United States Patent Application Publication US 2007/0134655 A1 - sequence listing, part 14

SEQ ID NO: 525086 - RNA, 32 nt, Human
uggggcccaggggaggccugagcuuggauuua

SEQ ID NO: 525087 - RNA, 32 nt, Human
uggggcccauguccaagacaauuccuggcaua

SEQ ID NO: 525088 - RNA, 18 nt, Human
uggggccccacagcccuc

SEQ ID NO: 525089 - RNA, 32 nt, Human
uggggccccaggaggaccucgggcugugggcc

SEQ ID NO: 525090 - RNA, 22 nt, Human
uggggcccccugccagccccuu

SEQ ID NO: 525091 - RNA, 32 nt, Human
uggggccccuguccuccagccugaccagcccu

SEQ ID NO: 525092 - RNA, 32 nt, Human
uggggccccuuggugaaccugaugcagguaag

SEQ ID NO: 525093 - RNA, 32 nt, Human
uggggcccggugucacucacagcuccaucucu

SEQ ID NO: 525094 - RNA, 32 nt, Human
uggggcccgucaucuugcacccuggcucugca

SEQ ID NO: 525095 - RNA, 25 nt, Human
uggggcccguuucuggccagagggu

SEQ ID NO: 525096 - RNA, 18 nt, Human
uggggcccucagccccuu

SEQ ID NO: 525097 - RNA, 32 nt, Human
uggggcccuccccugccgcauucccucacugg

SEQ ID NO: 525098 - RNA, 19 nt, Human
uggggcccugcccaagugg

SEQ ID NO: 525099 - RNA, 32 nt, Human
uggggcccugcugucaaccucuccuccaggcc

SEQ ID NO: 525100 - RNA, 21 nt, Human
uggggcccuuggccccagagg

SEQ ID NO: 525101 - RNA, 32 nt, Human
uggggccgcaugguacuuacaguuguucacuu

SEQ ID NO: 525102 - RNA, 32 nt, Human
uggggccgccgucuuccguccuaggagacucc

SEQ ID NO: 525103 - RNA, 32 nt, Human
uggggccggaggcggggugugagugggugugu

SEQ ID NO: 525104 - RNA, 19 nt, Human
uggggccggcugggcccuc

SEQ ID NO: 525105 - RNA, 32 nt, Human
uggggccggcuugcuucaugggcuagagccgc

SEQ ID NO: 525106 - RNA, 32 nt, Human
uggggccgggcaccggucacacggccaccgcc

SEQ ID NO: 525107 - RNA, 32 nt, Human
uggggccucaccugcuggaguccuuuguggcc

SEQ ID NO: 525108 - RNA, 32 nt, Human
uggggccucaccugcuggagucuucgguggcc

SEQ ID NO: 525109 - RNA, 32 nt, Human
uggggccucaccugcuggagucuuugguggcc

SEQ ID NO: 525110 - RNA, 32 nt, Human
uggggccuccuuguccuggauuuccagcucuc

SEQ ID NO: 525111 - RNA, 32 nt, Human
uggggccucugccucucgucugaccuugcagc

SEQ ID NO: 525112 - RNA, 32 nt, Human
uggggccucugggguggagcagcuuccgauag

SEQ ID NO: 525113 - RNA, 32 nt, Human
uggggccugaagggaaaugaggcagcugcugu

SEQ ID NO: 525114 - RNA, 32 nt, Human
uggggccugaagggaaaugggcagcugcugug

SEQ ID NO: 525115 - RNA, 32 nt, Human
uggggccugagcugccccacacaggaugcccc

SEQ ID NO: 525116 - RNA, 32 nt, Human
uggggccugaggcuucacaguaccuggaccag

SEQ ID NO: 525117 - RNA, 32 nt, Human
uggggccugcagccacuggcauugccaagaac

SEQ ID NO: 525118 - RNA, 32 nt, Human
uggggccugcaggcgcccuuguggaguuacca

SEQ ID NO: 525119 - RNA, 32 nt, Human
uggggccugcauaagaaaacuuaucucauuau

SEQ ID NO: 525120 - RNA, 32 nt, Human
uggggccugccggguguuccugggaagauggg

SEQ ID NO: 525121 - RNA, 23 nt, Human
uggggccugcucagccaagaagg

SEQ ID NO: 525122 - RNA, 32 nt, Human
uggggccugcucccagccacugaggcccgcuc

SEQ ID NO: 525123 - RNA, 32 nt, Human
uggggccuggccaggacucccagugugccaga

SEQ ID NO: 525124 - RNA, 32 nt, Human
uggggccuggccaggccaggguuugggccuaa

SEQ ID NO: 525125 - RNA, 32 nt, Human
uggggccugggcucccccucucugugccagcg

SEQ ID NO: 525126 - RNA, 32 nt, Human
uggggccugggugggcaggcaggaccugggcc

SEQ ID NO: 525127 - RNA, 32 nt, Human
uggggccuucacaggcugcagugggucccgag

SEQ ID NO: 525128 - RNA, 32 nt, Human
uggggccuuccucuuuguuucuuggguccuaa

SEQ ID NO: 525129 - RNA, 32 nt, Human
uggggccuugcuccucuuccuccuuucuuggc

SEQ ID NO: 525130 - RNA, 32 nt, Human
uggggccuuggcucuugggccugcugccucuu

SEQ ID NO: 525131 - RNA, 32 nt, Human
uggggccuuguuccccagaggguccccaggga

SEQ ID NO: 525132 - RNA, 32 nt, Human
uggggcgaggcagaggacagaucaauggcgca

SEQ ID NO: 525133 - RNA, 32 nt, Human
uggggcgcaccacggucacuuuggccuggaaa

SEQ ID NO: 525134 - RNA, 32 nt, Human
uggggcgcaggagggagaaguugcuaagugcu

SEQ ID NO: 525135 - RNA, 32 nt, Human
uggggcgcagugaggcugggagccggcccuga

SEQ ID NO: 525136 - RNA, 32 nt, Human
uggggcgcaguggcucacgccuguaaucccag

SEQ ID NO: 525137 - RNA, 32 nt, Human
uggggcgcauuccaaccuuccagccugcgacc

SEQ ID NO: 525138 - RNA, 32 nt, Human
uggggcgccugccucccugcuccucuguccuc

SEQ ID NO: 525139 - RNA, 32 nt, Human
uggggcgcgggugggagcgcgggggaacccuc

SEQ ID NO: 525140 - RNA, 32 nt, Human
uggggcggacugaacagagggagcuccagcuc

SEQ ID NO: 525141 - RNA, 32 nt, Human
uggggcggaggcagcggcuguagcggggcugu

SEQ ID NO: 525142 - RNA, 32 nt, Human
uggggcggaggguggaaggcagcuuccgucga

SEQ ID NO: 525143 - RNA, 32 nt, Human
uggggcggagucucacuguguugcccaggcug

SEQ ID NO: 525144 - RNA, 32 nt, Human
uggggcggccaguuuugacacgccccagugcc

SEQ ID NO: 525145 - RNA, 32 nt, Human
uggggcggcccaggcugaagccaucuccgggu

SEQ ID NO: 525146 - RNA, 32 nt, Human
uggggcggcgaauuugggaaggagggagaggg

SEQ ID NO: 525147 - RNA, 32 nt, Human
uggggcggcgccgccucuccacccgcagccug

SEQ ID NO: 525148 - RNA, 32 nt, Human
uggggcggcugaaguaggagggucacuuagcc

SEQ ID NO: 525149 - RNA, 32 nt, Human
uggggcgggacuuccggcauuuggaugggacg

SEQ ID NO: 525150 - RNA, 31 nt, Human
uggggcgggaugcuugggccugggucucucc

SEQ ID NO: 525151 - RNA, 32 nt, Human
uggggcgggcaacccccagaaagcgggcagca

SEQ ID NO: 525152 - RNA, 32 nt, Human
uggggcgggcugaugagcaccuggauuuucac

SEQ ID NO: 525153 - RNA, 32 nt, Human
uggggcggggcuuggaaggagcagggagccuu

SEQ ID NO: 525154 - RNA, 32 nt, Human
uggggcgguaacuccaugcccgcgggcacagg

SEQ ID NO: 525155 - RNA, 32 nt, Human
uggggcggugugugugccaugucacagcaugg

SEQ ID NO: 525156 - RNA, 32 nt, Human
uggggcgucccucccgcucgcuucuugacucg

SEQ ID NO: 525157 - RNA, 32 nt, Human
uggggcgugaagaacagaagacaggaagcguu

SEQ ID NO: 525158 - RNA, 32 nt, Human
uggggcgugaagaacagaagacaggagaaaag

SEQ ID NO: 525159 - RNA, 32 nt, Human
uggggcgugagagcggggguuagguggcaccc

SEQ ID NO: 525160 - RNA, 32 nt, Human
uggggcgugccuguagucccauguacuuggga

SEQ ID NO: 525161 - RNA, 32 nt, Human
uggggcgugcuucaggcuccucccucuaaggg

SEQ ID NO: 525162 - RNA, 32 nt, Human
uggggcguggggcuggggcagagcaggguucc

SEQ ID NO: 525163 - RNA, 19 nt, Human
uggggcgugggggguuaga

SEQ ID NO: 525164 - RNA, 32 nt, Human
uggggcguggugaguuggaaugauacguccau

SEQ ID NO: 525165 - RNA, 32 nt, Human
uggggcguuugggggugugcgguggggaggug

SEQ ID NO: 525166 - RNA, 19 nt, Human
uggggcuaagcagcccccu

SEQ ID NO: 525167 - RNA, 32 nt, Human
uggggcuaagcagcugucgcacggucagauca

SEQ ID NO: 525168 - RNA, 32 nt, Human
uggggcuaaggcaggaggaucacuugagcccc

SEQ ID NO: 525169 - RNA, 32 nt, Human
uggggcuaagugagagauggauacacuguuuc

SEQ ID NO: 525170 - RNA, 32 nt, Human
uggggcuagggggagccccuucugcucagcuc

SEQ ID NO: 525171 - RNA, 32 nt, Human
uggggcuauaggagccucccacuuucaccaga

SEQ ID NO: 525172 - RNA, 19 nt, Human
uggggcucaagaagccugg

SEQ ID NO: 525173 - RNA, 32 nt, Human
uggggcucaagcaguucucccaccagccuccu

SEQ ID NO: 525174 - RNA, 32 nt, Human
uggggcucacagucuggcugcaccggcucacc

SEQ ID NO: 525175 - RNA, 32 nt, Human
uggggcucacauucuagacugggaaacauaca

SEQ ID NO: 525176 - RNA, 20 nt, Human
uggggcucagcuggagucag

SEQ ID NO: 525177 - RNA, 19 nt, Human
uggggcucagcuucccucu

SEQ ID NO: 525178 - RNA, 21 nt, Human
uggggcucagggcagccaccc

SEQ ID NO: 525179 - RNA, 32 nt, Human
uggggcucaugagggaggauggaguuucuugg

SEQ ID NO: 525180 - RNA, 32 nt, Human
uggggcuccagaaccucccaaguuauguucuc

SEQ ID NO: 525181 - RNA, 32 nt, Human
uggggcuccaggaccuucccuaccuccaccac

SEQ ID NO: 525182 - RNA, 32 nt, Human
uggggcuccaucuaggcucugaaaggauauuc

SEQ ID NO: 525183 - RNA, 18 nt, Human
uggggcucccaauccccu

SEQ ID NO: 525184 - RNA, 32 nt, Human
uggggcucccacaggcuggagugcaauggugu

SEQ ID NO: 525185 - RNA, 32 nt, Human
uggggcucccagaggagcucucggcucuaagu

SEQ ID NO: 525186 - RNA, 32 nt, Human
uggggcucccuaggccucucccucuucagagg

SEQ ID NO: 525187 - RNA, 32 nt, Human
uggggcuccgaacccuaaaugggugagaguug

SEQ ID NO: 525188 - RNA, 32 nt, Human
uggggcuccgguuucaggggugagaggagcca

SEQ ID NO: 525189 - RNA, 21 nt, Human
uggggcuccuccagcuccccc

SEQ ID NO: 525190 - RNA, 32 nt, Human
uggggcuccuggaaggaggaagaggcucucca

SEQ ID NO: 525191 - RNA, 32 nt, Human
uggggcucucagaacuuaagagaugugccauc

SEQ ID NO: 525192 - RNA, 32 nt, Human
uggggcucucauucugacagcuccuuaaaugc

SEQ ID NO: 525193 - RNA, 18 nt, Human
uggggcucuccacccccu

SEQ ID NO: 525194 - RNA, 32 nt, Human
uggggcucugcaguuccugcaucucuaagcuu

SEQ ID NO: 525195 - RNA, 32 nt, Human
uggggcucuggcugccuucuccacccacccca

SEQ ID NO: 525196 - RNA, 32 nt, Human
uggggcucugggaggaagaagcgucaggacug

SEQ ID NO: 525197 - RNA, 32 nt, Human
uggggcucuuacucccuccugaggccagcugc

SEQ ID NO: 525198 - RNA, 32 nt, Human
uggggcucuugggcagaaagaugaggagacag

SEQ ID NO: 525199 - RNA, 32 nt, Human
uggggcucuugguuuccagagggucuggacug

SEQ ID NO: 525200 - RNA, 32 nt, Human
uggggcucuuucucugaaggccacuuuccuga

SEQ ID NO: 525201 - RNA, 32 nt, Human
uggggcugaaagcagaagcaugcacagggagg

SEQ ID NO: 525202 - RNA, 32 nt, Human
uggggcugaaggagcuauaauacaaacagggg

SEQ ID NO: 525203 - RNA, 32 nt, Human
uggggcugagaacugcagcccugggucuuccc

SEQ ID NO: 525204 - RNA, 32 nt, Human
uggggcugagacugggcugacaucuagaauca

SEQ ID NO: 525205 - RNA, 32 nt, Human
uggggcugaggcugaggcacuggcgaggagag

SEQ ID NO: 525206 - RNA, 32 nt, Human
uggggcugaggggcugcaaggagaaguugcau

SEQ ID NO: 525207 - RNA, 32 nt, Human
uggggcugagguugggggaggggugggcggca

SEQ ID NO: 525208 - RNA, 32 nt, Human
uggggcugagucuucacuuuguuuugcugugg

SEQ ID NO: 525209 - RNA, 32 nt, Human
uggggcugagugaaaacaucugcacaacuggg

SEQ ID NO: 525210 - RNA, 32 nt, Human
uggggcugcaccacccggcccgaggcuuuuga

SEQ ID NO: 525211 - RNA, 32 nt, Human
uggggcugcaggaagccaucggugagaaggcc

SEQ ID NO: 525212 - RNA, 32 nt, Human
uggggcugcccaggcaaagucagugaacauga

SEQ ID NO: 525213 - RNA, 32 nt, Human
uggggcugccugaggaugaggcugcaucuccc

SEQ ID NO: 525214 - RNA, 32 nt, Human
uggggcugcggcucuggccucccaggcccauc

SEQ ID NO: 525215 - RNA, 32 nt, Human
uggggcugcucugggcccuggaauccaagaaa

SEQ ID NO: 525216 - RNA, 32 nt, Human
uggggcugcugggugcacagaugaggggaggu

SEQ ID NO: 525217 - RNA, 32 nt, Human
uggggcugcuugugguuuccaaacgucggcag

SEQ ID NO: 525218 - RNA, 32 nt, Human
uggggcuggaaccugggguuuugcuugggugu

SEQ ID NO: 525219 - RNA, 32 nt, Human
uggggcuggaccaggcccuggaggccaauaaa

SEQ ID NO: 525220 - RNA, 32 nt, Human
uggggcuggagagagaggaccaucccaggcug

SEQ ID NO: 525221 - RNA, 32 nt, Human
uggggcuggaugcuuggguaacuggggcaggg

SEQ ID NO: 525222 - RNA, 22 nt, Human
uggggcuggcaagaggccgcug

SEQ ID NO: 525223 - RNA, 32 nt, Human
uggggcuggcugcugcggcggcggcgcugggc

SEQ ID NO: 525224 - RNA, 32 nt, Human
uggggcugggcauggaggcucacaccuguaau

SEQ ID NO: 525225 - RNA, 32 nt, Human
uggggcugggcugagccagggaggaaggaccc

SEQ ID NO: 525226 - RNA, 32 nt, Human
uggggcugggcuggagaggguggcaggcagug

SEQ ID NO: 525227 - RNA, 32 nt, Human
uggggcugggguccccucagugugaauggccc

SEQ ID NO: 525228 - RNA, 32 nt, Human
uggggcugggguguuuaccuggagccuggaca

SEQ ID NO: 525229 - RNA, 22 nt, Human
uggggcuggguccccuagugga

SEQ ID NO: 525230 - RNA, 32 nt, Human
uggggcuggguucugucuucuacaggccaccc

SEQ ID NO: 525231 - RNA, 19 nt, Human
uggggcuguacagggcccu

SEQ ID NO: 525232 - RNA, 32 nt, Human
uggggcugucaacgcugccccuuguccugccg

SEQ ID NO: 525233 - RNA, 32 nt, Human
uggggcuguccauccauggcucugccuacgga

SEQ ID NO: 525234 - RNA, 29 nt, Human
uggggcugucuguguuucccagguggagc

SEQ ID NO: 525235 - RNA, 32 nt, Human
uggggcugugaauucuuucuucauccccgcau

SEQ ID NO: 525236 - RNA, 32 nt, Human
uggggcugugcaccuuccugguguuuggacag

SEQ ID NO: 525237 - RNA, 32 nt, Human
uggggcugugccgcccacaggaguugagacaa

SEQ ID NO: 525238 - RNA, 32 nt, Human
uggggcuguggccucucagggggcagccucuc

SEQ ID NO: 525239 - RNA, 32 nt, Human
uggggcugugggcucagagcucaggagucgcc

SEQ ID NO: 525240 - RNA, 32 nt, Human
uggggcuguggugcuagggcuguggggcacag

SEQ ID NO: 525241 - RNA, 32 nt, Human
uggggcuguuccugugaacagagcagaguggg

SEQ ID NO: 525242 - RNA, 32 nt, Human
uggggcuguuucuccccuccgacuggggcucc

SEQ ID NO: 525243 - RNA, 32 nt, Human
uggggcuucaggaguaauaaagugucacccua

SEQ ID NO: 525244 - RNA, 21 nt, Human
uggggcuuccggcccuacaca

SEQ ID NO: 525245 - RNA, 32 nt, Human
uggggcuuccuugagaaggccagccccaaagg

SEQ ID NO: 525246 - RNA, 32 nt, Human
uggggcuucucccucccguuucaggggaaagg

SEQ ID NO: 525247 - RNA, 32 nt, Human
uggggcuucucuucccuccaugagccuggaga

SEQ ID NO: 525248 - RNA, 32 nt, Human
uggggcuucuucuccccuucuuccuuuccccu

SEQ ID NO: 525249 - RNA, 32 nt, Human
uggggcuugcuaacuguugagcuguuuuaacu

SEQ ID NO: 525250 - RNA, 32 nt, Human
uggggcuuggggcgugcgagauuucccuugca

SEQ ID NO: 525251 - RNA, 32 nt, Human
uggggcuugggggcgggggaggguggcagugg

SEQ ID NO: 525252 - RNA, 32 nt, Human
uggggcuugugcagcuggcaguguuccugccc

SEQ ID NO: 525253 - RNA, 32 nt, Human
uggggcuuucaacccucucccccaccacccag

SEQ ID NO: 525254 - RNA, 32 nt, Human
uggggcuuugggcugggaggggaaggcggguc

SEQ ID NO: 525255 - RNA, 19 nt, Human
uggggcuuuuagagccccc

SEQ ID NO: 525256 - RNA, 32 nt, Human
uggggcuuuucuuccuccccugcucucucucc

SEQ ID NO: 525257 - RNA, 32 nt, Human
ugggggaaaaagcagcaggauccagagcuaua

SEQ ID NO: 525258 - RNA, 32 nt, Human
ugggggaaacaggcgguuccugcccgguucuu

SEQ ID NO: 525259 - RNA, 32 nt, Human
ugggggaaaccagcuucuugccagccacagcu

SEQ ID NO: 525260 - RNA, 18 nt, Human
ugggggaaacccaguggg

SEQ ID NO: 525261 - RNA, 32 nt, Human
ugggggaaacugaggcaguggggaagacagag

SEQ ID NO: 525262 - RNA, 32 nt, Human
ugggggaaagagcauccggagugaaggggacg

SEQ ID NO: 525263 - RNA, 32 nt, Human
ugggggaaggagagaagggcagcucagggugg

SEQ ID NO: 525264 - RNA, 32 nt, Human
ugggggaagggcagggguguggagagggggug

SEQ ID NO: 525265 - RNA, 32 nt, Human
ugggggaagggccacaaccucuguuucuguga

SEQ ID NO: 525266 - RNA, 32 nt, Human
ugggggaagggugaguuuacaggugaggagug

SEQ ID NO: 525267 - RNA, 32 nt, Human
ugggggaaguggccagaguagagaugcuggga

SEQ ID NO: 525268 - RNA, 32 nt, Human
ugggggaauaagaguaggcucaguugacagaa

SEQ ID NO: 525269 - RNA, 32 nt, Human
ugggggaaucgucaugacugccaaucucaaca

SEQ ID NO: 525270 - RNA, 32 nt, Human
ugggggaaucuugccuuucccuuucagagccc

SEQ ID NO: 525271 - RNA, 32 nt, Human
ugggggacaacaaaacauguuuuccuuuuucu

SEQ ID NO: 525272 - RNA, 32 nt, Human
ugggggacaauguacagcauucuggccaucca

SEQ ID NO: 525273 - RNA, 32 nt, Human
ugggggacacgccuggugucucuuacuccgac

SEQ ID NO: 525274 - RNA, 32 nt, Human
ugggggacacuuccagugugcaugccagagug

SEQ ID NO: 525275 - RNA, 32 nt, Human
ugggggacagcgucccagccccgagggcaagc

SEQ ID NO: 525276 - RNA, 24 nt, Human
ugggggacagggcagggcuggguc

SEQ ID NO: 525277 - RNA, 32 nt, Human
ugggggacgccgcccucucugccgcaggcugg

SEQ ID NO: 525278 - RNA, 32 nt, Human
ugggggacggccgccuccucccagccacugug

SEQ ID NO: 525279 - RNA, 32 nt, Human
ugggggacugcuuucagugccugcuguucgug

SEQ ID NO: 525280 - RNA, 20 nt, Human
ugggggacugggaggccugg

SEQ ID NO: 525281 - RNA, 32 nt, Human
ugggggacugggugggaaggguggugggagga

SEQ ID NO: 525282 - RNA, 32 nt, Human
ugggggacuuccugccuguccccauggccugu

SEQ ID NO: 525283 - RNA, 32 nt, Human
ugggggacuugcagccaggagugaucugcuga

SEQ ID NO: 525284 - RNA, 32 nt, Human
ugggggagaaaaagagccccuccucuggggua

SEQ ID NO: 525285 - RNA, 32 nt, Human
ugggggagaaaagggaaaaugcugucaguaga

SEQ ID NO: 525286 - RNA, 32 nt, Human
ugggggagaacagcauucccgccgccuccagc

SEQ ID NO: 525287 - RNA, 32 nt, Human
ugggggagacuaagggcuacaggccagcgugg

SEQ ID NO: 525288 - RNA, 32 nt, Human
ugggggagagaagggaaaagauccccaagacc

SEQ ID NO: 525289 - RNA, 32 nt, Human
ugggggagagguacagaaagaagagaaaagac

SEQ ID NO: 525290 - RNA, 32 nt, Human
ugggggagagguuaggaggagagaggacgaag

SEQ ID NO: 525291 - RNA, 32 nt, Human
ugggggagcccugcccuccugguucggccucc

SEQ ID NO: 525292 - RNA, 18 nt, Human
ugggggagccgggcccuc

SEQ ID NO: 525293 - RNA, 32 nt, Human
ugggggaggaagagagggaggcacguaggaac

SEQ ID NO: 525294 - RNA, 21 nt, Human
ugggggaggacacgguccccc

SEQ ID NO: 525295 - RNA, 32 nt, Human
ugggggaggagaaagaggggucacuccugcca

SEQ ID NO: 525296 - RNA, 32 nt, Human
ugggggaggagagagauaacaaacuggugagc

SEQ ID NO: 525297 - RNA, 18 nt, Human
ugggggaggagaugggga

SEQ ID NO: 525298 - RNA, 32 nt, Human
ugggggaggagguugagggaacagggggcuga

SEQ ID NO: 525299 - RNA, 32 nt, Human
ugggggaggaguucuuuucucagucucgcccc

SEQ ID NO: 525300 - RNA, 32 nt, Human
ugggggaggccggaucucuagagccauccugc

SEQ ID NO: 525301 - RNA, 32 nt, Human
ugggggaggcugggagagguugggugcucucc

SEQ ID NO: 525302 - RNA, 32 nt, Human
ugggggaggcugucccacucccagcucuggca

SEQ ID NO: 525303 - RNA, 32 nt, Human
ugggggaggcuuccagcucagucccacagccc

SEQ ID NO: 525304 - RNA, 32 nt, Human
ugggggagggacugcugacccaccaaggucuc

SEQ ID NO: 525305 - RNA, 32 nt, Human
ugggggagggagggaaagagaagagcucugca

SEQ ID NO: 525306 - RNA, 32 nt, Human
ugggggaggggaggggcaggaagaggugagaa

SEQ ID NO: 525307 - RNA, 32 nt, Human
ugggggaggguaacugauggcaagggugggaa

SEQ ID NO: 525308 - RNA, 32 nt, Human
ugggggaguccacccucuccuugaugcagcuu

SEQ ID NO: 525309 - RNA, 32 nt, Human
ugggggagucuggagagagacuggacagggua

SEQ ID NO: 525310 - RNA, 32 nt, Human
ugggggauaagaaagccugggaggggccugug

SEQ ID NO: 525311 - RNA, 32 nt, Human
ugggggaucagcagggcaguugucgggcaguc

SEQ ID NO: 525312 - RNA, 32 nt, Human
ugggggaucagugccugcugugugcugauacu

SEQ ID NO: 525313 - RNA, 32 nt, Human
ugggggaugacgguggggagguugccagaugu

SEQ ID NO: 525314 - RNA, 32 nt, Human
ugggggaugaggucagggggucuuggguggga

SEQ ID NO: 525315 - RNA, 32 nt, Human
ugggggaugccaugagggccucccaccacaaa

SEQ ID NO: 525316 - RNA, 32 nt, Human
ugggggauggagcagggaauaagacauugaaa

SEQ ID NO: 525317 - RNA, 32 nt, Human
ugggggaugggaggguuggauugaacagccag

SEQ ID NO: 525318 - RNA, 22 nt, Human
ugggggauggggauggggccag

SEQ ID NO: 525319 - RNA, 32 nt, Human
ugggggauggggauggggccaggcucagugua

SEQ ID NO: 525320 - RNA, 32 nt, Human
ugggggauuccugggagccaugugggagaggc

SEQ ID NO: 525321 - RNA, 32 nt, Human
ugggggcaaaucaggacacaacagagggcaga

SEQ ID NO: 525322 - RNA, 32 nt, Human
ugggggcacaacuguuuucuguuugcuguuuu

SEQ ID NO: 525323 - RNA, 32 nt, Human
ugggggcacaggcugaauuagaugagcuccug

SEQ ID NO: 525324 - RNA, 23 nt, Human
ugggggcaccaagaccccaaagg

SEQ ID NO: 525325 - RNA, 32 nt, Human
ugggggcaccaucaaggacagaacagcaauuu

SEQ ID NO: 525326 - RNA, 19 nt, Human
ugggggcaccucuggccuc

SEQ ID NO: 525327 - RNA, 32 nt, Human
ugggggcaccuuaagauuuugcaccuguaaag

SEQ ID NO: 525328 - RNA, 32 nt, Human
ugggggcacgaagugggcccugggugaccccc

SEQ ID NO: 525329 - RNA, 32 nt, Human
ugggggcacugaggaccagccauugaggggug

SEQ ID NO: 525330 - RNA, 32 nt, Human
ugggggcagaguccuaggaugaggcuugggca

SEQ ID NO: 525331 - RNA, 32 nt, Human
ugggggcagauauuauccccauuuuucagaug

SEQ ID NO: 525332 - RNA, 32 nt, Human
ugggggcagcccuuaaaucccuucccuguggg

SEQ ID NO: 525333 - RNA, 32 nt, Human
ugggggcagcgagcuccagcccucggcggugg

SEQ ID NO: 525334 - RNA, 20 nt, Human
ugggggcagcucccagcgag

SEQ ID NO: 525335 - RNA, 32 nt, Human
ugggggcagcucucuucucuccccaggaccca

SEQ ID NO: 525336 - RNA, 32 nt, Human
ugggggcagcugugccaaucuaccucacaggc

SEQ ID NO: 525337 - RNA, 32 nt, Human
ugggggcaggaaaggugagguguugcuggccu

SEQ ID NO: 525338 - RNA, 32 nt, Human
ugggggcaggcagaagggagaaccagcucaag

SEQ ID NO: 525339 - RNA, 32 nt, Human
ugggggcagggagccuggccaggccugagaca

SEQ ID NO: 525340 - RNA, 32 nt, Human
ugggggcagggaggggacagugugggccuggc

SEQ ID NO: 525341 - RNA, 32 nt, Human
ugggggcaggguggaguggagggggagcuacu

SEQ ID NO: 525342 - RNA, 32 nt, Human
ugggggcagggugggggcacgaagugggcccu

SEQ ID NO: 525343 - RNA, 32 nt, Human
ugggggcaggguggggguugauguugaacuuu

SEQ ID NO: 525344 - RNA, 32 nt, Human
ugggggcagguguggggcuguggaauuccaaa

SEQ ID NO: 525345 - RNA, 32 nt, Human
ugggggcaguccugugcacggccuccaugaaa

SEQ ID NO: 525346 - RNA, 32 nt, Human
ugggggcagugggggaaggaaggggagaggug

SEQ ID NO: 525347 - RNA, 20 nt, Human
ugggggcaugccgggcccuc

SEQ ID NO: 525348 - RNA, 32 nt, Human
ugggggccacagccacaccucaccgcccaguc

SEQ ID NO: 525349 - RNA, 32 nt, Human
ugggggccacagggacacugcucugccugccu

SEQ ID NO: 525350 - RNA, 24 nt, Human
ugggggccacagggucccagcaga

SEQ ID NO: 525351 - RNA, 32 nt, Human
ugggggccaccaggcucagcgcaagaggaagc

SEQ ID NO: 525352 - RNA, 32 nt, Human
ugggggccaccccacugggggucuccaguggu

SEQ ID NO: 525353 - RNA, 32 nt, Human
ugggggccagaagacaagagagacggcgaggc

SEQ ID NO: 525354 - RNA, 32 nt, Human
ugggggccagcccuggauagguuuuuauggga

SEQ ID NO: 525355 - RNA, 32 nt, Human
ugggggccaggccacauggcuggagaggaauu

SEQ ID NO: 525356 - RNA, 24 nt, Human
ugggggccauggcucaugccugua

SEQ ID NO: 525357 - RNA, 32 nt, Human
ugggggccauucugagccugcagugagaguuu

SEQ ID NO: 525358 - RNA, 32 nt, Human
ugggggccauuuucucuacaggcaaauggaau

SEQ ID NO: 525359 - RNA, 21 nt, Human
ugggggcccacugccuaggga

SEQ ID NO: 525360 - RNA, 32 nt, Human
ugggggcccacuguggagagcugguuucccac

SEQ ID NO: 525361 - RNA, 22 nt, Human
ugggggcccaucgccgugggga

SEQ ID NO: 525362 - RNA, 18 nt, Human
ugggggcccauggggccc

SEQ ID NO: 525363 - RNA, 32 nt, Human
ugggggcccauggggcccccaagaagcggacu

SEQ ID NO: 525364 - RNA, 32 nt, Human
ugggggcccugugcccuugccggcggcagguu

SEQ ID NO: 525365 - RNA, 32 nt, Human
ugggggccgaacagcagugcucaccagugacg

SEQ ID NO: 525366 - RNA, 32 nt, Human
ugggggccgguggcucaccccuguaaucucag

SEQ ID NO: 525367 - RNA, 32 nt, Human
ugggggccgucagcugucuccuugauguuugg

SEQ ID NO: 525368 - RNA, 32 nt, Human
ugggggccuaaacuuguuccugccucccucac

SEQ ID NO: 525369 - RNA, 32 nt, Human
ugggggccucaaggaauccgggugugcugaga

SEQ ID NO: 525370 - RNA, 32 nt, Human
ugggggccugagagacagacaggaacccacaa

SEQ ID NO: 525371 - RNA, 32 nt, Human
ugggggccugagcagacacagaggugcaggca

SEQ ID NO: 525372 - RNA, 32 nt, Human
ugggggccuugagugaaaggcagcagugggag

SEQ ID NO: 525373 - RNA, 32 nt, Human
ugggggccuugcagccuccaccccuacagugc

SEQ ID NO: 525374 - RNA, 32 nt, Human
ugggggccuuucuuuaacugccuuccuggcuu

SEQ ID NO: 525375 - RNA, 32 nt, Human
ugggggcgaaaggagagagggagggaagggug

SEQ ID NO: 525376 - RNA, 32 nt, Human
ugggggcgagcuuccugcagcugcagagcauc

SEQ ID NO: 525377 - RNA, 32 nt, Human
ugggggcgcaaacccuuuuccucccagccuau

SEQ ID NO: 525378 - RNA, 32 nt, Human
ugggggcgcagcccuguggugcucaggcagag

SEQ ID NO: 525379 - RNA, 32 nt, Human
ugggggcgcggugcugccgccuccaggucucc

SEQ ID NO: 525380 - RNA, 32 nt, Human
ugggggcggaggcgggagugagaggagaaggg

SEQ ID NO: 525381 - RNA, 32 nt, Human
ugggggcggagggagcuggagcugucacaguc

SEQ ID NO: 525382 - RNA, 32 nt, Human
ugggggcggaugguggcccaggagacagcaca

SEQ ID NO: 525383 - RNA, 32 nt, Human
ugggggcggcugccugugucagccagggagcu

SEQ ID NO: 525384 - RNA, 32 nt, Human
ugggggcggggagguggaguggagaggcccgc

SEQ ID NO: 525385 - RNA, 32 nt, Human
ugggggcggggcaggggcagguguagccucug

SEQ ID NO: 525386 - RNA, 20 nt, Human
ugggggcggggccgggggga

SEQ ID NO: 525387 - RNA, 22 nt, Human
ugggggcggggguccaggcaga

SEQ ID NO: 525388 - RNA, 24 nt, Human
ugggggcgguagcucauaccugua

SEQ ID NO: 525389 - RNA, 32 nt, Human
ugggggcgucagcagaggggcagagauaauga

SEQ ID NO: 525390 - RNA, 32 nt, Human
ugggggcguugagggccaucucacaggcugcc

SEQ ID NO: 525391 - RNA, 22 nt, Human
ugggggcuaagguuuccaguca

SEQ ID NO: 525392 - RNA, 32 nt, Human
ugggggcucaggagacagaagggacagugggc

SEQ ID NO: 525393 - RNA, 32 nt, Human
ugggggcucccagggucuccgguggugcaccu

SEQ ID NO: 525394 - RNA, 32 nt, Human
ugggggcuccugcccuccuccaacaacccagg

SEQ ID NO: 525395 - RNA, 32 nt, Human
ugggggcucgaauccagguugaagggucacca

SEQ ID NO: 525396 - RNA, 32 nt, Human
ugggggcucuggaaggaugggccagcuugcag

SEQ ID NO: 525397 - RNA, 32 nt, Human
ugggggcugaggcagaggcagggauagcuggg

SEQ ID NO: 525398 - RNA, 32 nt, Human
ugggggcugagucucugaaaagucuaagaagc

SEQ ID NO: 525399 - RNA, 32 nt, Human
ugggggcugcaggcgcgcuaggagaacuaugc

SEQ ID NO: 525400 - RNA, 21 nt, Human
ugggggcugccaggggcccuc

SEQ ID NO: 525401 - RNA, 32 nt, Human
ugggggcugcccacagaugggcagucucagcc

SEQ ID NO: 525402 - RNA, 21 nt, Human
ugggggcugccgcggacacug

SEQ ID NO: 525403 - RNA, 32 nt, Human
ugggggcugccuggacuggucuggcagguugg

SEQ ID NO: 525404 - RNA, 32 nt, Human
ugggggcugcuggggccagggucgggcaugca

SEQ ID NO: 525405 - RNA, 32 nt, Human
ugggggcuggaaccccuccccgggaggagugc

SEQ ID NO: 525406 - RNA, 32 nt, Human
ugggggcuggacuggccuggucuggcugggaa

SEQ ID NO: 525407 - RNA, 21 nt, Human
ugggggcuggcagcagacccc

SEQ ID NO: 525408 - RNA, 32 nt, Human
ugggggcuggcaucccagcuccaacucgagga

SEQ ID NO: 525409 - RNA, 32 nt, Human
ugggggcuggccagucagggagggcuaggggg

SEQ ID NO: 525410 - RNA, 32 nt, Human
ugggggcugggaacagcagaggggauagaagu

SEQ ID NO: 525411 - RNA, 18 nt, Human
ugggggcuguagggcccu

SEQ ID NO: 525412 - RNA, 22 nt, Human
ugggggcugugugucaugcuca

SEQ ID NO: 525413 - RNA, 32 nt, Human
ugggggcuuuuauuccccuccuugagccccag

SEQ ID NO: 525414 - RNA, 25 nt, Human
uggggggaaagggacuucuagcaaa

SEQ ID NO: 525415 - RNA, 21 nt, Human
uggggggaaauguuacgcaaa

SEQ ID NO: 525416 - RNA, 21 nt, Human
uggggggaaauuaccaguaga

SEQ ID NO: 525417 - RNA, 23 nt, Human
uggggggaagaauccuuaccaag

SEQ ID NO: 525418 - RNA, 20 nt, Human
uggggggaagaugcgggaaa

SEQ ID NO: 525419 - RNA, 19 nt, Human
uggggggaaggaaagcgga

SEQ ID NO: 525420 - RNA, 22 nt, Human
uggggggaauguucucagcaga

SEQ ID NO: 525421 - RNA, 20 nt, Human
uggggggaggacccugugaa

SEQ ID NO: 525422 - RNA, 20 nt, Human
uggggggagggcccgggaaa

SEQ ID NO: 525423 - RNA, 18 nt, Human
uggggggagugccagcaa

SEQ ID NO: 525424 - RNA, 19 nt, Human
uggggggauggugagcaaa

SEQ ID NO: 525425 - RNA, 18 nt, Human
uggggggcaggggcccuc

SEQ ID NO: 525426 - RNA, 17 nt, Human
uggggggccacacacuc

SEQ ID NO: 525427 - RNA, 21 nt, Human
ugggggguaaugaacuaaaga

SEQ ID NO: 525428 - RNA, 21 nt, Human
ugggggguaggguuuuguaaa

SEQ ID NO: 525429 - RNA, 19 nt, Human
uggggggugacccccaagg

SEQ ID NO: 525430 - RNA, 23 nt, Human
ugggggguggccagcggcccccu

SEQ ID NO: 525431 - RNA, 32 nt, Human
uggggguaaggagggaaggaagagggaaagag

SEQ ID NO: 525432 - RNA, 32 nt, Human
uggggguaagggggaccagagaggcgggcugg

SEQ ID NO: 525433 - RNA, 32 nt, Human
uggggguagcagacuggagcccaggggugaug

SEQ ID NO: 525434 - RNA, 32 nt, Human
uggggguagggaggggagaguuaaccugcugg

SEQ ID NO: 525435 - RNA, 32 nt, Human
uggggguaggguggggguggggagaacacuua

SEQ ID NO: 525436 - RNA, 32 nt, Human
uggggguaguaaggcuggaguggguagaggaa

SEQ ID NO: 525437 - RNA, 32 nt, Human
ugggggucagaagaagugggagcagcuucuug

SEQ ID NO: 525438 - RNA, 32 nt, Human
ugggggucagcagggcggagcggcuuuuccag

SEQ ID NO: 525439 - RNA, 32 nt, Human
uggggguccuaagagccaggggaugaaaaggg

SEQ ID NO: 525440 - RNA, 32 nt, Human
ugggggucucacuauguugcccaggcuggucu

SEQ ID NO: 525441 - RNA, 32 nt, Human
ugggggucucacuguguugcucuggcuggucu

SEQ ID NO: 525442 - RNA, 23 nt, Human
ugggggucugggcguccagcuca

SEQ ID NO: 525443 - RNA, 17 nt, Human
ugggggucuucccagca

SEQ ID NO: 525444 - RNA, 18 nt, Human
ugggggucuucccagcaa

SEQ ID NO: 525445 - RNA, 32 nt, Human
ugggggucuucccagcaacaucagcucuguca

SEQ ID NO: 525446 - RNA, 32 nt, Human
ugggggugaaagacggggccacugcagcccuu

SEQ ID NO: 525447 - RNA, 32 nt, Human
ugggggugacaugggccagauccuccugcccc

SEQ ID NO: 525448 - RNA, 32 nt, Human
ugggggugacgauaucuaccucuuggggugug

SEQ ID NO: 525449 - RNA, 32 nt, Human
ugggggugagccugaaggccacagagaaagaa

SEQ ID NO: 525450 - RNA, 32 nt, Human
ugggggugaggaggacaagaaggagaggaaaa

SEQ ID NO: 525451 - RNA, 22 nt, Human
ugggggugaggauuccagagga

SEQ ID NO: 525452 - RNA, 32 nt, Human
ugggggugaugccaguuagaaguggguaguga

SEQ ID NO: 525453 - RNA, 32 nt, Human
ugggggugcagaagucuuuuuaucucuauaua

SEQ ID NO: 525454 - RNA, 32 nt, Human
ugggggugccgcucuaaauuggcuccauauca

SEQ ID NO: 525455 - RNA, 32 nt, Human
ugggggugccugagugcugugaccaagggacu

SEQ ID NO: 525456 - RNA, 22 nt, Human
ugggggugccugauugauccua

SEQ ID NO: 525457 - RNA, 32 nt, Human
ugggggugcuaucaggguaacacugccugcag

SEQ ID NO: 525458 - RNA, 32 nt, Human
uggggguggaaaggacagagcccaggcgaccu

SEQ ID NO: 525459 - RNA, 32 nt, Human
uggggguggcagacgagcccacggcgccgugg

SEQ ID NO: 525460 - RNA, 32 nt, Human
ugggggugggagugagcccaccacagaggcca

SEQ ID NO: 525461 - RNA, 32 nt, Human
ugggggugggcugugcucagagcagggagcgg

SEQ ID NO: 525462 - RNA, 32 nt, Human
uggggguggggaaaagcccaggagagcagugg

SEQ ID NO: 525463 - RNA, 32 nt, Human
uggggguggggaagggaggccgccacagcucc

SEQ ID NO: 525464 - RNA, 32 nt, Human
uggggguggggcaccccagcugcccugacaga

SEQ ID NO: 525465 - RNA, 32 nt, Human
uggggguggggcgccuuccuggaggugacacu

SEQ ID NO: 525466 - RNA, 32 nt, Human
ugggggugggggaggagguugagggaacaggg

SEQ ID NO: 525467 - RNA, 32 nt, Human
ugggggugggggugguaaggggagaccgggga

SEQ ID NO: 525468 - RNA, 32 nt, Human
uggggguggguaagggaggggaugguuuaugu

SEQ ID NO: 525469 - RNA, 19 nt, Human
ugggggugggucugaggga

SEQ ID NO: 525470 - RNA, 31 nt, Human
uggggguggguggccggguggguggagcguu

SEQ ID NO: 525471 - RNA, 31 nt, Human
uggggguggguggggagcuuuuggggaggac

SEQ ID NO: 525472 - RNA, 31 nt, Human
uggggguggguggguggauaucuuaauuuuu

SEQ ID NO: 525473 - RNA, 24 nt, Human
ugggggugguagcacauaccugua

SEQ ID NO: 525474 - RNA, 32 nt, Human
uggggguggugaggaccugauagaguuggauc

SEQ ID NO: 525475 - RNA, 32 nt, Human
uggggguguaugggguagauggguggagaggg

SEQ ID NO: 525476 - RNA, 32 nt, Human
ugggggugucuuuuucuuuucauaaaguaaca

SEQ ID NO: 525477 - RNA, 32 nt, Human
uggggguguugguguuuccucccuggagaaga

SEQ ID NO: 525478 - RNA, 32 nt, Human
uggggguucagaucgauggccuuguccauguu

SEQ ID NO: 525479 - RNA, 32 nt, Human
uggggguucccaggagccaugcguggccugca

SEQ ID NO: 525480 - RNA, 32 nt, Human
uggggguuccugcagcaacccccagccucagu

SEQ ID NO: 525481 - RNA, 32 nt, Human
uggggguucuguagccggaggcggcggcgagu

SEQ ID NO: 525482 - RNA, 32 nt, Human
uggggguugaguuuuggccuucauccuuguag

SEQ ID NO: 525483 - RNA, 32 nt, Human
uggggguuggagaagggugaggggcuuccccc

SEQ ID NO: 525484 - RNA, 21 nt, Human
uggggguugggacccagcaag

SEQ ID NO: 525485 - RNA, 32 nt, Human
uggggguuguuaucacagaagauacugucuca

SEQ ID NO: 525486 - RNA, 18 nt, Human
uggggguuuccuagcaga

SEQ ID NO: 525487 - RNA, 32 nt, Human
uggggguuuugccauguugcccaagcaggucu

SEQ ID NO: 525488 - RNA, 32 nt, Human
ugggguaaagaauuuggugagaaggagcugaa

SEQ ID NO: 525489 - RNA, 32 nt, Human
ugggguaacccgaggugcagagcugagaauga

SEQ ID NO: 525490 - RNA, 32 nt, Human
ugggguaagcauuuucauucuuccugcugaag

SEQ ID NO: 525491 - RNA, 32 nt, Human
ugggguaaguggucuugaaggauucauuuagu

SEQ ID NO: 525492 - RNA, 32 nt, Human
ugggguaauuuucuucaaagggaguuuguuau

SEQ ID NO: 525493 - RNA, 32 nt, Human
ugggguaccacccccagggcaggauggggaca

SEQ ID NO: 525494 - RNA, 32 nt, Human
ugggguacgguggcaugaucauggcucacugc

SEQ ID NO: 525495 - RNA, 32 nt, Human
ugggguacuacacucaccaccugggugacggg

SEQ ID NO: 525496 - RNA, 32 nt, Human
ugggguacuggcagagcuguggcucgaauucc

SEQ ID NO: 525497 - RNA, 32 nt, Human
ugggguagaaaggcuuccccuacccugggccc

SEQ ID NO: 525498 - RNA, 32 nt, Human
ugggguagaacucgucagugaagaggggcuca

SEQ ID NO: 525499 - RNA, 32 nt, Human
ugggguagaacucgucagugaagaggggcucg

SEQ ID NO: 525500 - RNA, 32 nt, Human
ugggguagagaccaacccugaggacucagugu

SEQ ID NO: 525501 - RNA, 32 nt, Human
ugggguagauucuugagaagcauuucauauaa

SEQ ID NO: 525502 - RNA, 32 nt, Human
ugggguagcgacagacaaucccagaaacacgc

SEQ ID NO: 525503 - RNA, 21 nt, Human
ugggguaggccgggugcagug

SEQ ID NO: 525504 - RNA, 32 nt, Human
ugggguagggcaccacccccuccuggggugag

SEQ ID NO: 525505 - RNA, 18 nt, Human
ugggguaggucggggaga

SEQ ID NO: 525506 - RNA, 32 nt, Human
ugggguaucucccauuacccaugucgcccuca

SEQ ID NO: 525507 - RNA, 32 nt, Human
ugggguaugauggcugacugcucauuguuccc

SEQ ID NO: 525508 - RNA, 20 nt, Human
ugggguauggaggggcccuu

SEQ ID NO: 525509 - RNA, 32 nt, Human
uggggucaaaucagcuccuucucuccaagugc

SEQ ID NO: 525510 - RNA, 32 nt, Human
uggggucaagaaggaaaaugugugugagcaug

SEQ ID NO: 525511 - RNA, 32 nt, Human
uggggucaagacagaugacaccagcacuuuaa

SEQ ID NO: 525512 - RNA, 32 nt, Human
uggggucaagacaggugacaccagcacuuuaa

SEQ ID NO: 525513 - RNA, 32 nt, Human
uggggucaagccauccucccaccucagcuuuc

SEQ ID NO: 525514 - RNA, 32 nt, Human
uggggucaaggaacaggaagcugaccuggaug

SEQ ID NO: 525515 - RNA, 32 nt, Human
uggggucaaggcagcaggacugaucaagugac

SEQ ID NO: 525516 - RNA, 32 nt, Human
uggggucaccacccuccccugucuucucucaa

SEQ ID NO: 525517 - RNA, 32 nt, Human
uggggucacuucgugaauucaccagagacuca

SEQ ID NO: 525518 - RNA, 32 nt, Human
uggggucagaccuugcaucucagucagcccag

SEQ ID NO: 525519 - RNA, 32 nt, Human
uggggucagagcagugcccgaggaagcggggu

SEQ ID NO: 525520 - RNA, 32 nt, Human
uggggucagaggccgggacacugaggcagcag

SEQ ID NO: 525521 - RNA, 32 nt, Human
uggggucagagugguucucccagggccuucaa

SEQ ID NO: 525522 - RNA, 32 nt, Human
uggggucagccacugccaauccugccuuacuc

SEQ ID NO: 525523 - RNA, 32 nt, Human
uggggucagcccucgucacacugcggcacagg

SEQ ID NO: 525524 - RNA, 32 nt, Human
uggggucagcucagcucccugccuugucacau

SEQ ID NO: 525525 - RNA, 32 nt, Human
uggggucaggaaaaugccaggggacaugagcu

SEQ ID NO: 525526 - RNA, 32 nt, Human
uggggucaggaacaucuggcagagggaggucc

SEQ ID NO: 525527 - RNA, 18 nt, Human
uggggucaggaagaggag

SEQ ID NO: 525528 - RNA, 32 nt, Human
uggggucaggaguucaaaaccagccuggccaa

SEQ ID NO: 525529 - RNA, 32 nt, Human
uggggucaggaguucaagaccagccugcccaa

SEQ ID NO: 525530 - RNA, 18 nt, Human
uggggucaggaugacgag

SEQ ID NO: 525531 - RNA, 18 nt, Human
uggggucaggccccagag

SEQ ID NO: 525532 - RNA, 32 nt, Human
uggggucagggaggaaaggcagaagcugggag

SEQ ID NO: 525533 - RNA, 32 nt, Human
uggggucaggguuugagaccagccuggccaac

SEQ ID NO: 525534 - RNA, 32 nt, Human
uggggucaggugagcagccaccagaggcaugg

SEQ ID NO: 525535 - RNA, 32 nt, Human
uggggucagguguggagaucagggucggggag

SEQ ID NO: 525536 - RNA, 19 nt, Human
uggggucaguuccagcaga

SEQ ID NO: 525537 - RNA, 32 nt, Human
uggggucauaagcaacagcaguagaagguggc

SEQ ID NO: 525538 - RNA, 32 nt, Human
uggggucauaggucugcacagagcaggcguag

SEQ ID NO: 525539 - RNA, 32 nt, Human
uggggucauugccauccucccuacucaugacu

SEQ ID NO: 525540 - RNA, 32 nt, Human
ugggguccaaaccacauguguccugccucucc

SEQ ID NO: 525541 - RNA, 32 nt, Human
ugggguccaggcugggccaggagaccaggcag

SEQ ID NO: 525542 - RNA, 32 nt, Human
ugggguccaucaccccaggggguccauaguug

SEQ ID NO: 525543 - RNA, 32 nt, Human
uggggucccagcugccugccugccucuuagga

SEQ ID NO: 525544 - RNA, 32 nt, Human
ugggguccgcagacuacugccacccacucacc

SEQ ID NO: 525545 - RNA, 32 nt, Human
ugggguccuagcaaccuccacauguucaccua

SEQ ID NO: 525546 - RNA, 32 nt, Human
ugggguccucacugcagcuggccucuggcagc

SEQ ID NO: 525547 - RNA, 32 nt, Human
ugggguccucuugguucugccugcagccugcc

SEQ ID NO: 525548 - RNA, 32 nt, Human
ugggguccugacugaagaagguguccaggggg

SEQ ID NO: 525549 - RNA, 32 nt, Human
ugggguccugcagaauccaaguuuacaaacca

SEQ ID NO: 525550 - RNA, 32 nt, Human
ugggguccugggagguggucgcccugcagugc

SEQ ID NO: 525551 - RNA, 18 nt, Human
ugggguccuguggggccc

SEQ ID NO: 525552 - RNA, 32 nt, Human
ugggguccuugagacagaggcaggacccucgu

SEQ ID NO: 525553 - RNA, 32 nt, Human
ugggguccuugaugggcaugugugauggggaa

SEQ ID NO: 525554 - RNA, 32 nt, Human
uggggucggccaggacccucacagcucugaau

SEQ ID NO: 525555 - RNA, 32 nt, Human
uggggucgggaggagagagauggggaagcuga

SEQ ID NO: 525556 - RNA, 28 nt, Human
uggggucgggucacugccucauccaccg

SEQ ID NO: 525557 - RNA, 32 nt, Human
uggggucucaaggcuggagucaaggugauggc

SEQ ID NO: 525558 - RNA, 32 nt, Human
uggggucucagaggaaugauggaagccuuggg

SEQ ID NO: 525559 - RNA, 32 nt, Human
uggggucucaggagucaggcagggccagcaca

SEQ ID NO: 525560 - RNA, 32 nt, Human
uggggucuccagccuggcugcugcugggcccu

SEQ ID NO: 525561 - RNA, 32 nt, Human
uggggucuccaucaccgggaccuggagaggga

SEQ ID NO: 525562 - RNA, 32 nt, Human
uggggucuccugggacccgccuguugcuucug

SEQ ID NO: 525563 - RNA, 18 nt, Human
uggggucucgcucuguca

SEQ ID NO: 525564 - RNA, 21 nt, Human
uggggucucgggucacugcag

SEQ ID NO: 525565 - RNA, 32 nt, Human
uggggucucuaggagcucugcaggccccagca

SEQ ID NO: 525566 - RNA, 32 nt, Human
uggggucugccuggccuguggguucugccggu

SEQ ID NO: 525567 - RNA, 32 nt, Human
uggggucugccugguccuugagccccugaguu

SEQ ID NO: 525568 - RNA, 32 nt, Human
uggggucugcugaauuggcuucuuuucuuuug

SEQ ID NO: 525569 - RNA, 32 nt, Human
uggggucugggagggggugagaggcaggaaug

SEQ ID NO: 525570 - RNA, 32 nt, Human
uggggucugggcacucugccucugggagagag

SEQ ID NO: 525571 - RNA, 32 nt, Human
uggggucugggcuccagccagagaacaaucuu

SEQ ID NO: 525572 - RNA, 32 nt, Human
uggggucuguaugccuuugucuugucauuugc

SEQ ID NO: 525573 - RNA, 32 nt, Human
uggggucuuacagaugugucucugaguaguaa

SEQ ID NO: 525574 - RNA, 32 nt, Human
uggggugaaagggaggauugaagaaugccgcg

SEQ ID NO: 525575 - RNA, 32 nt, Human
uggggugaaggcccugauacacgcaccuaccu

SEQ ID NO: 525576 - RNA, 32 nt, Human
uggggugagaggaggcccaggaggagagagag

SEQ ID NO: 525577 - RNA, 32 nt, Human
uggggugagcaucaguccuggcucugcugguc

SEQ ID NO: 525578 - RNA, 32 nt, Human
uggggugagccaccuccaacagaugccaaccu

SEQ ID NO: 525579 - RNA, 32 nt, Human
uggggugagccuggggacaguggagccucuga

SEQ ID NO: 525580 - RNA, 32 nt, Human
uggggugagccugucuguccucccucagagcc

SEQ ID NO: 525581 - RNA, 32 nt, Human
uggggugagggacagagccccacgcuguugac

SEQ ID NO: 525582 - RNA, 32 nt, Human
uggggugaucccgggcuaggggagcgcggcgg

SEQ ID NO: 525583 - RNA, 32 nt, Human
uggggugauggagaagaaacaggcugugcugu

SEQ ID NO: 525584 - RNA, 32 nt, Human
uggggugcaaaggaaaggugggugagggaagc

SEQ ID NO: 525585 - RNA, 32 nt, Human
uggggugcaagcugccgcguucccuggcuggu

SEQ ID NO: 525586 - RNA, 32 nt, Human
uggggugcagaggcacggggagagggaggaug

SEQ ID NO: 525587 - RNA, 32 nt, Human
uggggugcagaggcagaagaugaaggacaaaa

SEQ ID NO: 525588 - RNA, 32 nt, Human
uggggugcagcgucuggucagccgagggugaa

SEQ ID NO: 525589 - RNA, 32 nt, Human
uggggugcaggcauugcacagagcaugaaugg

SEQ ID NO: 525590 - RNA, 32 nt, Human
uggggugcagggagggagaggcaggggagaga

SEQ ID NO: 525591 - RNA, 32 nt, Human
uggggugcagggugcaccuguacuggaaaauu

SEQ ID NO: 525592 - RNA, 32 nt, Human
uggggugcaguggcacaaucauggcucacugc

SEQ ID NO: 525593 - RNA, 32 nt, Human
uggggugcaguggcacgaucuuggcucacugu

SEQ ID NO: 525594 - RNA, 32 nt, Human
uggggugcaguggcgugaucuuggcucacugc

SEQ ID NO: 525595 - RNA, 32 nt, Human
uggggugccaguggaagagagaaagcaggcga

SEQ ID NO: 525596 - RNA, 19 nt, Human
uggggugccuguaguccca

SEQ ID NO: 525597 - RNA, 22 nt, Human
uggggugccuguagucccagcu

SEQ ID NO: 525598 - RNA, 32 nt, Human
uggggugccuguagucccagcuacucgggagg

SEQ ID NO: 525599 - RNA, 32 nt, Human
uggggugcgcgcacuccuucagcguguccugg

SEQ ID NO: 525600 - RNA, 32 nt, Human
uggggugcucagaucucucaggaaaaccaguu

SEQ ID NO: 525601 - RNA, 32 nt, Human
uggggugcuccuggggcgggaggggcgcgcuc

SEQ ID NO: 525602 - RNA, 32 nt, Human
uggggugcucuucccccuccuuauaaauguuc

SEQ ID NO: 525603 - RNA, 32 nt, Human
uggggugcugcgugcgcugccugcucccgccu

SEQ ID NO: 525604 - RNA, 32 nt, Human
uggggugcugcuguaccacacagccaagggga

SEQ ID NO: 525605 - RNA, 32 nt, Human
uggggugcuggacuggcccuccagaggguaag

SEQ ID NO: 525606 - RNA, 32 nt, Human
uggggugcugggcuccccuagacuaggacucc

SEQ ID NO: 525607 - RNA, 32 nt, Human
uggggugcugugguaauaagaagcuaugacau

SEQ ID NO: 525608 - RNA, 32 nt, Human
uggggugcugugguccaagaaggacccagcuu

SEQ ID NO: 525609 - RNA, 32 nt, Human
ugggguggaagagggacagccggcugggccac

SEQ ID NO: 525610 - RNA, 32 nt, Human
ugggguggacucagaugccaggaaagggacag

SEQ ID NO: 525611 - RNA, 32 nt, Human
ugggguggagagguggggugggguggggugug

SEQ ID NO: 525612 - RNA, 32 nt, Human
ugggguggaggaucagucacacugcugagugu

SEQ ID NO: 525613 - RNA, 32 nt, Human
ugggguggagggaggaagggcugggagggagu

SEQ ID NO: 525614 - RNA, 32 nt, Human
ugggguggcacaugccuguaaucccagcacuu

SEQ ID NO: 525615 - RNA, 32 nt, Human
ugggguggcagcagggacagaaaacaacagag

SEQ ID NO: 525616 - RNA, 20 nt, Human
ugggguggccagccaagagg

SEQ ID NO: 525617 - RNA, 32 nt, Human
ugggguggcccaggcagcagaagguucccuga

SEQ ID NO: 525618 - RNA, 32 nt, Human
ugggguggccccaggguagguaacagucuuag

SEQ ID NO: 525619 - RNA, 32 nt, Human
ugggguggccuauggaccuggcccaucugcca

SEQ ID NO: 525620 - RNA, 32 nt, Human
ugggguggccugcagugacacagaaaggaaga

SEQ ID NO: 525621 - RNA, 32 nt, Human
ugggguggcucaugccuguaaucccaguacuu

SEQ ID NO: 525622 - RNA, 32 nt, Human
ugggguggcuccugccccuucugcccugccuu

SEQ ID NO: 525623 - RNA, 32 nt, Human
ugggguggcuccugccucacccucugcccagc

SEQ ID NO: 525624 - RNA, 32 nt, Human
uggggugggaaccuggggugugguuccagaaa

SEQ ID NO: 525625 - RNA, 32 nt, Human
uggggugggaagaucacuugagcccaggaggu

SEQ ID NO: 525626 - RNA, 30 nt, Human
uggggugggagccacagggacgacccgggg

SEQ ID NO: 525627 - RNA, 32 nt, Human
uggggugggaggaucacaugaacccaggaggu

SEQ ID NO: 525628 - RNA, 32 nt, Human
uggggugggaggauccauugagaccaggagau

SEQ ID NO: 525629 - RNA, 32 nt, Human
uggggugggaggaucgcuugaacccaggaggu

SEQ ID NO: 525630 - RNA, 32 nt, Human
uggggugggaggauggcgggggcagggggccg

SEQ ID NO: 525631 - RNA, 32 nt, Human
uggggugggaggauggcuugagcccaggaguu

SEQ ID NO: 525632 - RNA, 19 nt, Human
uggggugggagggcagggg

SEQ ID NO: 525633 - RNA, 32 nt, Human
uggggugggagggcaggggugggagcccuccu

SEQ ID NO: 525634 - RNA, 32 nt, Human
uggggugggauaaggggaaggagaagagggag

SEQ ID NO: 525635 - RNA, 32 nt, Human
uggggugggcacucaccucagcagagccucaa

SEQ ID NO: 525636 - RNA, 32 nt, Human
uggggugggcagauugcuugagcugaggaguu

SEQ ID NO: 525637 - RNA, 32 nt, Human
uggggugggcagggcugggagaacuuuguaca

SEQ ID NO: 525638 - RNA, 32 nt, Human
uggggugggcagguucagcugugagagaggcu

SEQ ID NO: 525639 - RNA, 32 nt, Human
uggggugggcccugucauucgugguugauuuc

SEQ ID NO: 525640 - RNA, 32 nt, Human
ugggguggggaaagguggcccaguggagccgg

SEQ ID NO: 525641 - RNA, 32 nt, Human
ugggguggggacccguccaaggacaggcuggc

SEQ ID NO: 525642 - RNA, 32 nt, Human
ugggguggggaccgggugaggggccugacggc

SEQ ID NO: 525643 - RNA, 32 nt, Human
ugggguggggagcagagcuggagcucgaucau

SEQ ID NO: 525644 - RNA, 32 nt, Human
ugggguggggauccuugggaagaauuacuccc

SEQ ID NO: 525645 - RNA, 20 nt, Human
ugggguggggaucuugcaaa

SEQ ID NO: 525646 - RNA, 32 nt, Human
ugggguggggccagaggagcucuccagcccug

SEQ ID NO: 525647 - RNA, 32 nt, Human
ugggguggggcugaagccuagggggugggccg

SEQ ID NO: 525648 - RNA, 22 nt, Human
uggggugggggauuccaucaaa

SEQ ID NO: 525649 - RNA, 32 nt, Human
uggggugggggcccugcuggcaacccugagcc

SEQ ID NO: 525650 - RNA, 32 nt, Human
uggggugggggugggaagaccccugaugcagc

SEQ ID NO: 525651 - RNA, 32 nt, Human
uggggugggguaggcagaugggccaaggugac

SEQ ID NO: 525652 - RNA, 32 nt, Human
uggggugggguggucagggugagcaggugggc

SEQ ID NO: 525653 - RNA, 32 nt, Human
ugggguggguagcugggggcccggacacuugg

SEQ ID NO: 525654 - RNA, 32 nt, Human
uggggugggugagcagaguucaaggaagccca

SEQ ID NO: 525655 - RNA, 32 nt, Human
uggggugggugaggacgggugggagggacagg

SEQ ID NO: 525656 - RNA, 32 nt, Human
ugggguggguggacccuggagacucucaggug

SEQ ID NO: 525657 - RNA, 32 nt, Human
ugggguggugccacugcgcuccagccuggggg

SEQ ID NO: 525658 - RNA, 32 nt, Human
uggggugguggcggccccugaggcagaccagg

SEQ ID NO: 525659 - RNA, 32 nt, Human
ugggguguaaagugccaugacugaauaaucuu

SEQ ID NO: 525660 - RNA, 32 nt, Human
uggggugucccaaggcugggcaccaaggcagg

SEQ ID NO: 525661 - RNA, 32 nt, Human
ugggguguccccggcagccacacacagccaug

SEQ ID NO: 525662 - RNA, 17 nt, Human
ugggguguccugggcuc

SEQ ID NO: 525663 - RNA, 19 nt, Human
uggggugucugcugggccc

SEQ ID NO: 525664 - RNA, 15 nt, Human
uggggugucuggcuc

SEQ ID NO: 525665 - RNA, 32 nt, Human
uggggugugacacuuuugagcgguugaauugg

SEQ ID NO: 525666 - RNA, 20 nt, Human
uggggugugagugagcucuc

SEQ ID NO: 525667 - RNA, 32 nt, Human
uggggugugcccuggggagccucagaagccug

SEQ ID NO: 525668 - RNA, 32 nt, Human
uggggugugccuguagucccagcuacuugaga

SEQ ID NO: 525669 - RNA, 32 nt, Human
uggggugugcugcugcugcuccccagcccacc

SEQ ID NO: 525670 - RNA, 32 nt, Human
uggggugugcuuguguggagugugcgugugca

SEQ ID NO: 525671 - RNA, 17 nt, Human
uggggugugggaggccc

SEQ ID NO: 525672 - RNA, 32 nt, Human
uggggugugggaggggcggggagguuuucuau

SEQ ID NO: 525673 - RNA, 32 nt, Human
uggggugugguggcucaugccuguaauccuag

SEQ ID NO: 525674 - RNA, 32 nt, Human
ugggguguggugugugcccucauagauggggg

SEQ ID NO: 525675 - RNA, 32 nt, Human
uggggugugguguguuucugugccagugcugu

SEQ ID NO: 525676 - RNA, 32 nt, Human
ugggguguguuuuucgguauguagggagaaaa

SEQ ID NO: 525677 - RNA, 16 nt, Human
ugggguguuuauagcc

SEQ ID NO: 525678 - RNA, 32 nt, Human
ugggguguuugugcaaccuucaucugcacugg

SEQ ID NO: 525679 - RNA, 32 nt, Human
ugggguuagggagguggggaagagauaaucuu

SEQ ID NO: 525680 - RNA, 32 nt, Human
ugggguuaucucuguguuagggguauaugaug

SEQ ID NO: 525681 - RNA, 20 nt, Human
ugggguuaugucccaguaaa

SEQ ID NO: 525682 - RNA, 32 nt, Human
ugggguucaagcaauccucccaccucaaccca

SEQ ID NO: 525683 - RNA, 32 nt, Human
ugggguucaagcaaucugcccaccucagccuc

SEQ ID NO: 525684 - RNA, 32 nt, Human
ugggguucaagcgauccucccaccucagccuc

SEQ ID NO: 525685 - RNA, 32 nt, Human
ugggguucaagugauccucccaccucagccuc

SEQ ID NO: 525686 - RNA, 32 nt, Human
ugggguucaauugaaaaggaacaugacaaacu

SEQ ID NO: 525687 - RNA, 32 nt, Human
ugggguucauucuuucaacaaauauacauuga

SEQ ID NO: 525688 - RNA, 18 nt, Human
ugggguuccaccauguca

SEQ ID NO: 525689 - RNA, 32 nt, Human
ugggguucccauuugacuccagucccaggcag

SEQ ID NO: 525690 - RNA, 24 nt, Human
ugggguucccccuccacccagugg

SEQ ID NO: 525691 - RNA, 32 nt, Human
ugggguuccuuuccuuuccugcuuccaccaug

SEQ ID NO: 525692 - RNA, 32 nt, Human
ugggguucuccuccucucccagggccuccuug

SEQ ID NO: 525693 - RNA, 21 nt, Human
ugggguucugggucgguucca

SEQ ID NO: 525694 - RNA, 32 nt, Human
ugggguucugucuucuuugauagccaucuauu

SEQ ID NO: 525695 - RNA, 32 nt, Human
ugggguucuuugagugggggaggcagggacga

SEQ ID NO: 525696 - RNA, 21 nt, Human
ugggguugaaguuugguuugg

SEQ ID NO: 525697 - RNA, 32 nt, Human
ugggguugagcagaggagaaaaucagaaagau

SEQ ID NO: 525698 - RNA, 32 nt, Human
ugggguugagcagaggagaaaaucagacagau

SEQ ID NO: 525699 - RNA, 32 nt, Human
ugggguugcaacaucuuuuaacuucucaguua

SEQ ID NO: 525700 - RNA, 32 nt, Human
ugggguugcaguauuguauaaaaucauaggau

SEQ ID NO: 525701 - RNA, 32 nt, Human
ugggguugcccagccuggagcggagcuugccu

SEQ ID NO: 525702 - RNA, 22 nt, Human
ugggguugccucccccuccugc

SEQ ID NO: 525703 - RNA, 21 nt, Human
ugggguuggaaagucagcugg

SEQ ID NO: 525704 - RNA, 20 nt, Human
ugggguuggaggccuggcug

SEQ ID NO: 525705 - RNA, 32 nt, Human
ugggguuggcagcugcucauucaugauggccu

SEQ ID NO: 525706 - RNA, 19 nt, Human
ugggguuggccagggcccu

SEQ ID NO: 525707 - RNA, 32 nt, Human
ugggguugggauccuuggaauauuucaauaaa

SEQ ID NO: 525708 - RNA, 32 nt, Human
ugggguuggggguggaggucuagaggugagcu

SEQ ID NO: 525709 - RNA, 32 nt, Human
ugggguugggguuguuuagggagaagcagcca

SEQ ID NO: 525710 - RNA, 32 nt, Human
ugggguugugggguggaggcuggcagcugaaa

SEQ ID NO: 525711 - RNA, 24 nt, Human
ugggguuguggugacuccagugga

SEQ ID NO: 525712 - RNA, 18 nt, Human
ugggguuuaccagcugga

SEQ ID NO: 525713 - RNA, 19 nt, Human
ugggguuucaagacaggga

SEQ ID NO: 525714 - RNA, 32 nt, Human
ugggguuucauuguucccgcugggccgggcgg

SEQ ID NO: 525715 - RNA, 21 nt, Human
ugggguuucccagccacugga

SEQ ID NO: 525716 - RNA, 17 nt, Human
ugggguuucccauguug

SEQ ID NO: 525717 - RNA, 16 nt, Human
ugggguuuccccaggg

SEQ ID NO: 525718 - RNA, 32 nt, Human
ugggguuugaugaucucggugcagauggugcu

SEQ ID NO: 525719 - RNA, 32 nt, Human
ugggguuugcagcugccacugagcuguagcug

SEQ ID NO: 525720 - RNA, 32 nt, Human
ugggguuuggagcccaccuacucucuggcagc

SEQ ID NO: 525721 - RNA, 32 nt, Human
ugggguuugucuucugugugccuguguccuca

SEQ ID NO: 525722 - RNA, 32 nt, Human
ugggguuuugcuucugucugucuguuuauugg

SEQ ID NO: 525723 - RNA, 32 nt, Human
ugggguuuuggccagcacagagccggggcguu

SEQ ID NO: 525724 - RNA, 32 nt, Human
uggguaacacauauggagguuugcugccauau

SEQ ID NO: 525725 - RNA, 32 nt, Human
uggguaacauggccagaccccaucucuauuua

SEQ ID NO: 525726 - RNA, 32 nt, Human
uggguaaccagaaaagggcuucacccauuugu

SEQ ID NO: 525727 - RNA, 32 nt, Human
uggguaagaauagaaagccacaggucuagcag

SEQ ID NO: 525728 - RNA, 32 nt, Human
uggguaauaguugcaugaaaacuuuugaacgu

SEQ ID NO: 525729 - RNA, 32 nt, Human
uggguaauauggcaaaaccccaucucuacuaa

SEQ ID NO: 525730 - RNA, 32 nt, Human
uggguaaucucuuaugggugggaggugagauu

SEQ ID NO: 525731 - RNA, 32 nt, Human
uggguacagaugggcauaggugcagugagugc

SEQ ID NO: 525732 - RNA, 24 nt, Human
uggguacaggggcauauaccugua

SEQ ID NO: 525733 - RNA, 32 nt, Human
uggguacagguaaaagccagacuuggcaggga

SEQ ID NO: 525734 - RNA, 32 nt, Human
uggguacaggugggcauaggugcagugagugc

SEQ ID NO: 525735 - RNA, 24 nt, Human
uggguacaguggcucacaccugua

SEQ ID NO: 525736 - RNA, 24 nt, Human
uggguacaguggcucacgccugua

SEQ ID NO: 525737 - RNA, 32 nt, Human
uggguacaucuuguaagacacauaaugagguc

SEQ ID NO: 525738 - RNA, 32 nt, Human
uggguaccaagcucccaggcccuuccucuauc

SEQ ID NO: 525739 - RNA, 32 nt, Human
uggguaccacaggaaccugggggccugugaaa

SEQ ID NO: 525740 - RNA, 32 nt, Human
uggguaccagcucuggcaguuggcaucaaugu

SEQ ID NO: 525741 - RNA, 32 nt, Human
uggguacccgagagacccggcgguggggaagu

SEQ ID NO: 525742 - RNA, 32 nt, Human
uggguacccucaccccugccucaggcugauua

SEQ ID NO: 525743 - RNA, 32 nt, Human
uggguaccgcuacuugggaggcugaggcagga

SEQ ID NO: 525744 - RNA, 32 nt, Human
uggguaccugcucuccgagucugugucuccag

SEQ ID NO: 525745 - RNA, 32 nt, Human
uggguaccuguaaucccagcuacuugggaggc

SEQ ID NO: 525746 - RNA, 32 nt, Human
uggguaccuguaaucccaguuacuuuggaggc

SEQ ID NO: 525747 - RNA, 24 nt, Human
uggguacgguggcucaugccugua

SEQ ID NO: 525748 - RNA, 32 nt, Human
uggguacuaagcuuaacaccugggugaugaaa

SEQ ID NO: 525749 - RNA, 32 nt, Human
uggguagaaagagauacagaggggcuguugaa

SEQ ID NO: 525750 - RNA, 32 nt, Human
uggguagaagaagcugggcaugggugcacccc

SEQ ID NO: 525751 - RNA, 32 nt, Human
uggguagaaguuggagaggaauccuggaauuu

SEQ ID NO: 525752 - RNA, 32 nt, Human
uggguagaauagguuuuccccucuuuuguuaa

SEQ ID NO: 525753 - RNA, 32 nt, Human
uggguagacugcugccggggaaucguacuucu

SEQ ID NO: 525754 - RNA, 32 nt, Human
uggguagagacaccuggaugacauuucaguac

SEQ ID NO: 525755 - RNA, 32 nt, Human
uggguagagacagggucccuuuguugcccagg

SEQ ID NO: 525756 - RNA, 32 nt, Human
uggguagagccaucccuucuucauccauagug

SEQ ID NO: 525757 - RNA, 32 nt, Human
uggguagaggcagagaugcugcugggcauccu

SEQ ID NO: 525758 - RNA, 32 nt, Human
uggguagaggcugcccgaaguacuguguaaag

SEQ ID NO: 525759 - RNA, 32 nt, Human
uggguagaggguccaccucacuugccugagug

SEQ ID NO: 525760 - RNA, 32 nt, Human
uggguagagguagaaagguuuaauuaacccug

SEQ ID NO: 525761 - RNA, 32 nt, Human
uggguagauaguagugggauugcuggaucaaa

SEQ ID NO: 525762 - RNA, 32 nt, Human
uggguagcaguggauguugggauauucuuucc

SEQ ID NO: 525763 - RNA, 32 nt, Human
uggguagcaucuguuucucucagcuuugccuu

SEQ ID NO: 525764 - RNA, 20 nt, Human
uggguagcauuacauuggca

SEQ ID NO: 525765 - RNA, 32 nt, Human
uggguagcgugaggacccacggggcugagcag

SEQ ID NO: 525766 - RNA, 32 nt, Human
uggguagcuuggcugccuccagaagagaugca

SEQ ID NO: 525767 - RNA, 32 nt, Human
uggguaggaaaagauguauguugcuauccugc

SEQ ID NO: 525768 - RNA, 32 nt, Human
uggguaggauuccucuggcacggagggagaga

SEQ ID NO: 525769 - RNA, 32 nt, Human
uggguaggcacaugauagggguugucacaagu

SEQ ID NO: 525770 - RNA, 32 nt, Human
uggguagggaaagaaaggagggaaaaaccaua

SEQ ID NO: 525771 - RNA, 32 nt, Human
uggguagggguuucagccccacccucaggaag

SEQ ID NO: 525772 - RNA, 32 nt, Human
uggguagguuccaguugaaagagggugguaga

SEQ ID NO: 525773 - RNA, 32 nt, Human
uggguagugggaggugggagggaagggcuuug

SEQ ID NO: 525774 - RNA, 32 nt, Human
uggguaguggggaaugaaggggacuggcaugu

SEQ ID NO: 525775 - RNA, 32 nt, Human
uggguauaagcagagagggauggguuccugcu

SEQ ID NO: 525776 - RNA, 32 nt, Human
uggguaucaagcaaaucugaccacaucaccuc

SEQ ID NO: 525777 - RNA, 32 nt, Human
uggguaucauagggagaccccgucucuacaaa

SEQ ID NO: 525778 - RNA, 32 nt, Human
uggguauccagggaggcucugcagcccugcug

SEQ ID NO: 525779 - RNA, 23 nt, Human
uggguauccaggggucucugaug

SEQ ID NO: 525780 - RNA, 32 nt, Human
uggguaugagagacugaggcuugagugaacug

SEQ ID NO: 525781 - RNA, 32 nt, Human
uggguaugcugaggcccacagacuuacagaag

SEQ ID NO: 525782 - RNA, 32 nt, Human
uggguauggugauguuggcaaaugauuaagcc

SEQ ID NO: 525783 - RNA, 24 nt, Human
uggguaugguggcacgugccugug

SEQ ID NO: 525784 - RNA, 24 nt, Human
uggguaugguggcaugugccugua

SEQ ID NO: 525785 - RNA, 24 nt, Human
uggguaugguggcuuaugccugua

SEQ ID NO: 525786 - RNA, 32 nt, Human
uggguauucuaggagcuuggacacgggauugc

SEQ ID NO: 525787 - RNA, 32 nt, Human
uggguauuugcugccaaggccacaucaccaau

SEQ ID NO: 525788 - RNA, 32 nt, Human
uggguauuuucaagaugguguggagggagaua

SEQ ID NO: 525789 - RNA, 32 nt, Human
uggguauuuuugguuuauaugcccucaaguaa

SEQ ID NO: 525790 - RNA, 32 nt, Human
ugggucaaaauggggagauguacuggguauga

SEQ ID NO: 525791 - RNA, 32 nt, Human
ugggucaaaccucccugcuccaggcaugaaga

SEQ ID NO: 525792 - RNA, 32 nt, Human
ugggucaaacuaaaauuagaaauguccccuca

SEQ ID NO: 525793 - RNA, 32 nt, Human
ugggucaaaggauggacaaaccuugaggguua

SEQ ID NO: 525794 - RNA, 32 nt, Human
ugggucaaauuugagauauaaaaaccuuucuc

SEQ ID NO: 525795 - RNA, 32 nt, Human
ugggucaaggcaccugccuguuuuuguuggug

SEQ ID NO: 525796 - RNA, 32 nt, Human
ugggucaaugaccauugcagagcuguuccugu

SEQ ID NO: 525797 - RNA, 32 nt, Human
ugggucaaugccuucagaaauggaauccagug

SEQ ID NO: 525798 - RNA, 32 nt, Human
ugggucaccagcugcccaaggugccggccugc

SEQ ID NO: 525799 - RNA, 32 nt, Human
ugggucacccuguccuggaugccucugaagag

SEQ ID NO: 525800 - RNA, 21 nt, Human
ugggucacgccuguaauccca

SEQ ID NO: 525801 - RNA, 32 nt, Human
ugggucacgccuguaaucccagcacuuuggga

SEQ ID NO: 525802 - RNA, 32 nt, Human
ugggucacugcaaacuccgccucccagguuca

SEQ ID NO: 525803 - RNA, 32 nt, Human
ugggucacugcaaccucugccuccuggguuca

SEQ ID NO: 525804 - RNA, 32 nt, Human
ugggucagaaggagccucauccuaaucucacu

SEQ ID NO: 525805 - RNA, 32 nt, Human
ugggucagccuccccuccaccacuuccuuccc

SEQ ID NO: 525806 - RNA, 32 nt, Human
ugggucaggaaagagaaagcaggaagaaaauc

SEQ ID NO: 525807 - RNA, 32 nt, Human
ugggucaggaguuugagaccagccuggccaac

SEQ ID NO: 525808 - RNA, 32 nt, Human
ugggucaggcagcuguugugauuguuaguauu

SEQ ID NO: 525809 - RNA, 32 nt, Human
ugggucaggcgcuuguggagagagggcuucgc

SEQ ID NO: 525810 - RNA, 32 nt, Human
ugggucagggcuucacuguguugcccaggcua

SEQ ID NO: 525811 - RNA, 32 nt, Human
ugggucaggguggggcaacaguggcaucaggu

SEQ ID NO: 525812 - RNA, 32 nt, Human
ugggucaguuguaucagcacguguggccuguu

SEQ ID NO: 525813 - RNA, 32 nt, Human
ugggucaguuuggccauaauucuggggucagg

SEQ ID NO: 525814 - RNA, 32 nt, Human
ugggucaugagccaugaguccugggacaucug

SEQ ID NO: 525815 - RNA, 28 nt, Human
ugggucauguuuacaguccucagugccc

SEQ ID NO: 525816 - RNA, 32 nt, Human
ugggucauuguagccucaaccucccaggcucc

SEQ ID NO: 525817 - RNA, 32 nt, Human
ugggucauuuuccugacucuagcugccaaaug

SEQ ID NO: 525818 - RNA, 32 nt, Human
uggguccaaauuguuggcuuucacuuuugacc

SEQ ID NO: 525819 - RNA, 32 nt, Human
uggguccaaggcccuggcccugcccagccucu

SEQ ID NO: 525820 - RNA, 32 nt, Human
uggguccacguuccucugcccuggguggggua

SEQ ID NO: 525821 - RNA, 32 nt, Human
uggguccagaagccucucagccaggagggagc

SEQ ID NO: 525822 - RNA, 32 nt, Human
uggguccagcagagagcuggcugggggcuuga

SEQ ID NO: 525823 - RNA, 32 nt, Human
uggguccagcagagggaguggaggaagggcca

SEQ ID NO: 525824 - RNA, 32 nt, Human
uggguccagcugcccaggucauggccuaccuc

SEQ ID NO: 525825 - RNA, 32 nt, Human
uggguccagcuuggccuuuucuucccagggac

SEQ ID NO: 525826 - RNA, 32 nt, Human
uggguccaggagguggaggcugcagugagcua

SEQ ID NO: 525827 - RNA, 32 nt, Human
uggguccaguggaggaagaaggaaggagaggc

SEQ ID NO: 525828 - RNA, 32 nt, Human
uggguccaucagagaaggugcaggugacagag

SEQ ID NO: 525829 - RNA, 32 nt, Human
uggguccaucuugcugcucagaagaaucccgu

SEQ ID NO: 525830 - RNA, 32 nt, Human
ugggucccacccuuuaaggaugcugaggccua

SEQ ID NO: 525831 - RNA, 32 nt, Human
ugggucccagagaguuuggaguguaggauucc

SEQ ID NO: 525832 - RNA, 32 nt, Human
ugggucccagcaccuaucucaggaagcagggu

SEQ ID NO: 525833 - RNA, 22 nt, Human
ugggucccaggcccauagcugc

SEQ ID NO: 525834 - RNA, 21 nt, Human
ugggucccauuuucagcgccc

SEQ ID NO: 525835 - RNA, 32 nt, Human
uggguccccaggaggagagccuuggguauaau

SEQ ID NO: 525836 - RNA, 32 nt, Human
uggguccccagugcccucagccccgcagcgua

SEQ ID NO: 525837 - RNA, 32 nt, Human
uggguccccaugccucuccagcaugcccuuuc

SEQ ID NO: 525838 - RNA, 19 nt, Human
uggguccccgcccuccagc

SEQ ID NO: 525839 - RNA, 21 nt, Human
uggguccccgccgcgcccgcu

SEQ ID NO: 525840 - RNA, 27 nt, Human
uggguccccuguuuccggagguccgcu

SEQ ID NO: 525841 - RNA, 32 nt, Human
ugggucccgggagauggaagccucccaggcgc

SEQ ID NO: 525842 - RNA, 32 nt, Human
ugggucccguaaaggagggcacgagggccacc

SEQ ID NO: 525843 - RNA, 32 nt, Human
ugggucccuaaccuauaaucucagcuucccua

SEQ ID NO: 525844 - RNA, 32 nt, Human
ugggucccucuaacaucucccauggcucuccc

SEQ ID NO: 525845 - RNA, 32 nt, Human
ugggucccucuccugcuggguggugcuuucuc

SEQ ID NO: 525846 - RNA, 32 nt, Human
ugggucccugcuccccuuugggggugugugug

SEQ ID NO: 525847 - RNA, 32 nt, Human
ugggucccuuaaaggagggcacgagggccacc

SEQ ID NO: 525848 - RNA, 32 nt, Human
ugggucccuugugacugcauuacacugagaaa

SEQ ID NO: 525849 - RNA, 32 nt, Human
uggguccgauuagccuuuucucugccuugcuu

SEQ ID NO: 525850 - RNA, 32 nt, Human
uggguccgcggcccuggcugggccacggcgcu

SEQ ID NO: 525851 - RNA, 32 nt, Human
uggguccggccugccugccugccugccugccu

SEQ ID NO: 525852 - RNA, 24 nt, Human
uggguccgguggcucacgccugua

SEQ ID NO: 525853 - RNA, 24 nt, Human
uggguccuaaauccaaccaacuac

SEQ ID NO: 525854 - RNA, 32 nt, Human
uggguccuccccucugagguuucucagguggc

SEQ ID NO: 525855 - RNA, 32 nt, Human
uggguccuccucccucugccucuguucagcuc

SEQ ID NO: 525856 - RNA, 32 nt, Human
uggguccucuucagaggccagaaaguucuaag

SEQ ID NO: 525857 - RNA, 32 nt, Human
uggguccugaggcacagcucugagcacagagg

SEQ ID NO: 525858 - RNA, 32 nt, Human
uggguccugagggagagcugcagugagaaguu

SEQ ID NO: 525859 - RNA, 32 nt, Human
uggguccugcacgccgccugguggcaggccgg

SEQ ID NO: 525860 - RNA, 32 nt, Human
uggguccugccucugccuggcagcucuguggg

SEQ ID NO: 525861 - RNA, 21 nt, Human
uggguccuggcgauuauuuua

SEQ ID NO: 525862 - RNA, 32 nt, Human
uggguccuggggagccacggaagguugugggu

SEQ ID NO: 525863 - RNA, 23 nt, Human
uggguccuggggccacagaccac

SEQ ID NO: 525864 - RNA, 32 nt, Human
uggguccuguuuuugucauguuuaugaggaga

SEQ ID NO: 525865 - RNA, 32 nt, Human
uggguccuucccauuacgcacacacauaaugu

SEQ ID NO: 525866 - RNA, 32 nt, Human
uggguccuuggggcgggcagggccagccucuc

SEQ ID NO: 525867 - RNA, 32 nt, Human
uggguccuugggucgcaggugggagccgacgg

SEQ ID NO: 525868 - RNA, 32 nt, Human
ugggucgaguuuaggccuuuuuggccauaguu

SEQ ID NO: 525869 - RNA, 32 nt, Human
ugggucgcaggugggagccgacggguggguag

SEQ ID NO: 525870 - RNA, 32 nt, Human
ugggucgcugcagccucaaccuccugggcuca

SEQ ID NO: 525871 - RNA, 32 nt, Human
ugggucgcuguugccagaccugcacccccaag

SEQ ID NO: 525872 - RNA, 32 nt, Human
ugggucggagccaaaccccacaggaaugcagc

SEQ ID NO: 525873 - RNA, 32 nt, Human
ugggucgguggcggaggcugaggagaaggagg

SEQ ID NO: 525874 - RNA, 32 nt, Human
ugggucgucaggagguggagguugcagugagc

SEQ ID NO: 525875 - RNA, 32 nt, Human
ugggucguccuugucuguagaagugaauacug

SEQ ID NO: 525876 - RNA, 32 nt, Human
ugggucgugagcucgccugaguaugggguggu

SEQ ID NO: 525877 - RNA, 32 nt, Human
ugggucguucuugucuguagaagugaauacug

SEQ ID NO: 525878 - RNA, 32 nt, Human
ugggucuaacccagaaccacagauggcucuga

SEQ ID NO: 525879 - RNA, 32 nt, Human
ugggucuagauugagggauacucccccuuucc

SEQ ID NO: 525880 - RNA, 32 nt, Human
ugggucuagcacaugucacccuuguccacguu

SEQ ID NO: 525881 - RNA, 32 nt, Human
ugggucuauuagccucuccccagauaucugag

SEQ ID NO: 525882 - RNA, 31 nt, Human
ugggucucaauucauuuacuguugaacacgg

SEQ ID NO: 525883 - RNA, 32 nt, Human
ugggucucagccacguacaaccucacggugga

SEQ ID NO: 525884 - RNA, 32 nt, Human
ugggucucaguuuuccccaucuggacccuugc

SEQ ID NO: 525885 - RNA, 22 nt, Human
ugggucucaugguuucauuuug

SEQ ID NO: 525886 - RNA, 32 nt, Human
ugggucuccacuacccagucacugacccuggg

SEQ ID NO: 525887 - RNA, 32 nt, Human
ugggucuccagcucuguaaccaguccuguccc

SEQ ID NO: 525888 - RNA, 32 nt, Human
ugggucucccgaguggcugggauuauaggcgu

SEQ ID NO: 525889 - RNA, 22 nt, Human
ugggucuccgcccagcuccagu

SEQ ID NO: 525890 - RNA, 21 nt, Human
ugggucuccguuucucuagcu

SEQ ID NO: 525891 - RNA, 32 nt, Human
ugggucuccuaaaguacugggauuacaggcgu

SEQ ID NO: 525892 - RNA, 22 nt, Human
ugggucucuagccucagucuug

SEQ ID NO: 525893 - RNA, 32 nt, Human
ugggucucuauuaauagauuuacccuuuauag

SEQ ID NO: 525894 - RNA, 32 nt, Human
ugggucucuccaagcagcugcagaccccagcu

SEQ ID NO: 525895 - RNA, 32 nt, Human
ugggucucucugcuguggcguucucucuugag

SEQ ID NO: 525896 - RNA, 32 nt, Human
ugggucucugcaggccugcucaccugccucca

SEQ ID NO: 525897 - RNA, 32 nt, Human
ugggucucuggaagaggaaccaggagaagggc

SEQ ID NO: 525898 - RNA, 32 nt, Human
ugggucucuggccuugcccugaaauuacuggg

SEQ ID NO: 525899 - RNA, 32 nt, Human
ugggucucugggagaggaaggaagagggaggg

SEQ ID NO: 525900 - RNA, 32 nt, Human
ugggucugaaacacuggcagucguuggaaaca

SEQ ID NO: 525901 - RNA, 32 nt, Human
ugggucugacucacccacaauccaucagccug

SEQ ID NO: 525902 - RNA, 32 nt, Human
ugggucugauccuagagacagaaaguugacug

SEQ ID NO: 525903 - RNA, 32 nt, Human
ugggucugcagccaugguuuggguggcuguag

SEQ ID NO: 525904 - RNA, 32 nt, Human
ugggucugcccugagcugugccugugugcucc

SEQ ID NO: 525905 - RNA, 32 nt, Human
ugggucugccuagucaugccucccaacugugg

SEQ ID NO: 525906 - RNA, 32 nt, Human
ugggucugcucagcaccuuccucucuccucca

SEQ ID NO: 525907 - RNA, 32 nt, Human
ugggucuggaggugaugagaucgggccacacu

SEQ ID NO: 525908 - RNA, 32 nt, Human
ugggucuggccuggccgccccuccagccugcu

SEQ ID NO: 525909 - RNA, 32 nt, Human
ugggucuggcucccgucagucuuugggccacg

SEQ ID NO: 525910 - RNA, 29 nt, Human
ugggucuggcugcugccgcccgccggugu

SEQ ID NO: 525911 - RNA, 32 nt, Human
ugggucugggaguggccucacccuggauucag

SEQ ID NO: 525912 - RNA, 32 nt, Human
ugggucugggccaccaggaucagccaggaggg

SEQ ID NO: 525913 - RNA, 32 nt, Human
ugggucuggucucaucagggagggcagcgcuc

SEQ ID NO: 525914 - RNA, 32 nt, Human
ugggucuguccucucagugcuuuccaggggcc

SEQ ID NO: 525915 - RNA, 32 nt, Human
ugggucugucuacacuggccgagucuccgacu

SEQ ID NO: 525916 - RNA, 32 nt, Human
ugggucugugagagcaaagcugaguucugguc

SEQ ID NO: 525917 - RNA, 32 nt, Human
ugggucuguggcugggaggagcucuggggaag

SEQ ID NO: 525918 - RNA, 32 nt, Human
ugggucuguguccuuuuucaagccuguuuaga

SEQ ID NO: 525919 - RNA, 32 nt, Human
ugggucuguuccagucgauucaagaugaacug

SEQ ID NO: 525920 - RNA, 32 nt, Human
ugggucuguuuuccuuucucaccgcagucguc

SEQ ID NO: 525921 - RNA, 32 nt, Human
ugggucuuagcauugaucagugacacaccucu

SEQ ID NO: 525922 - RNA, 32 nt, Human
ugggucuuagggaaaggaauggggaagcaaca

SEQ ID NO: 525923 - RNA, 32 nt, Human
ugggucuuccaagaggauucuuaagguaccag

SEQ ID NO: 525924 - RNA, 32 nt, Human
ugggucuucugaaucuagaguaaguccucugu

SEQ ID NO: 525925 - RNA, 32 nt, Human
ugggucuugcugucacuggauuuccuggcaug

SEQ ID NO: 525926 - RNA, 32 nt, Human
ugggucuuggagaggaaggacuuagggaggca

SEQ ID NO: 525927 - RNA, 32 nt, Human
ugggucuuggauacacaguuguauuuaauguu

SEQ ID NO: 525928 - RNA, 32 nt, Human
ugggucuuucccaccugccuguuuucauaucc

SEQ ID NO: 525929 - RNA, 32 nt, Human
ugggugaaaaguacuguucagagaugcaggug

SEQ ID NO: 525930 - RNA, 32 nt, Human
ugggugaacagcuuggccuuuugugggugucu

SEQ ID NO: 525931 - RNA, 32 nt, Human
ugggugaacauguaaacgcuaaguugaaaauc

SEQ ID NO: 525932 - RNA, 32 nt, Human
ugggugaagucagaacuuuguagagcagagaa

SEQ ID NO: 525933 - RNA, 17 nt, Human
ugggugaaugaugggga

SEQ ID NO: 525934 - RNA, 32 nt, Human
ugggugaaugcugcugccccugcuggcagcca

SEQ ID NO: 525935 - RNA, 32 nt, Human
ugggugacaaugcacacaugcugggcaaaagg

SEQ ID NO: 525936 - RNA, 32 nt, Human
ugggugacacgaggacacagggacagguucua

SEQ ID NO: 525937 - RNA, 32 nt, Human
ugggugacagagccaugagccagccauuuuau

SEQ ID NO: 525938 - RNA, 31 nt, Human
ugggugacagccucagaguguuucuucugcu

SEQ ID NO: 525939 - RNA, 32 nt, Human
ugggugacauauguaaucccagcacuuuggga

SEQ ID NO: 525940 - RNA, 32 nt, Human
ugggugacgaggccacccagagccaggcggug

SEQ ID NO: 525941 - RNA, 32 nt, Human
ugggugacguccaggucacaggcugcagcgag

SEQ ID NO: 525942 - RNA, 32 nt, Human
ugggugagaagagggaaaauugcagggaccuc

SEQ ID NO: 525943 - RNA, 32 nt, Human
ugggugagagaagggacuagacuccuaagccu

SEQ ID NO: 525944 - RNA, 32 nt, Human
ugggugagagagcagguaagagccaaagucac

SEQ ID NO: 525945 - RNA, 32 nt, Human
ugggugagauguguguuaaaacugacaaaccu

SEQ ID NO: 525946 - RNA, 32 nt, Human
ugggugagcgccaccagccugcagcccagcag

SEQ ID NO: 525947 - RNA, 32 nt, Human
ugggugagcugaaagagagggacuagagugcc

SEQ ID NO: 525948 - RNA, 32 nt, Human
ugggugaggaggccccgcugaagaacucgccu

SEQ ID NO: 525949 - RNA, 32 nt, Human
ugggugaggggcagauuucugccccuuugucc

SEQ ID NO: 525950 - RNA, 18 nt, Human
ugggugaggggggccgga

SEQ ID NO: 525951 - RNA, 32 nt, Human
ugggugagguuuuccaugacugccucaucagc

SEQ ID NO: 525952 - RNA, 32 nt, Human
ugggugagucgugugacucaggaaugggggua

SEQ ID NO: 525953 - RNA, 32 nt, Human
ugggugagucuguggccuucucuccagggccc

SEQ ID NO: 525954 - RNA, 32 nt, Human
ugggugauaggaugagacuccaucucagggga

SEQ ID NO: 525955 - RNA, 32 nt, Human
ugggugaucagaaggcuggggccaguguaagg

SEQ ID NO: 525956 - RNA, 32 nt, Human
ugggugaugacaggggaaucugaaaggggaga

SEQ ID NO: 525957 - RNA, 31 nt, Human
ugggugaugcucaugguaaacucgcucacag

SEQ ID NO: 525958 - RNA, 31 nt, Human
ugggugauggagagagauacugucuuaaaaa

SEQ ID NO: 525959 - RNA, 32 nt, Human
ugggugauggagcgaagaaccugucucuuaaa

SEQ ID NO: 525960 - RNA, 32 nt, Human
ugggugauggauccuggaaucucuccaucccu

SEQ ID NO: 525961 - RNA, 32 nt, Human
ugggugauggugguuguuagucugacuguugc

SEQ ID NO: 525962 - RNA, 32 nt, Human
ugggugauguuggacaacuggaaggaggacuc

SEQ ID NO: 525963 - RNA, 31 nt, Human
ugggugauucuucucccuccaagccaagcuu

SEQ ID NO: 525964 - RNA, 24 nt, Human
ugggugcagaggcucaugccugua

SEQ ID NO: 525965 - RNA, 32 nt, Human
ugggugcagcagagacagaggaagcagagcca

SEQ ID NO: 525966 - RNA, 32 nt, Human
ugggugcagccuggcuguugcucacccaagug

SEQ ID NO: 525967 - RNA, 32 nt, Human
ugggugcagcgugaggcuucagccuggagccc

SEQ ID NO: 525968 - RNA, 24 nt, Human
ugggugcaguggcucacaccggua

SEQ ID NO: 525969 - RNA, 21 nt, Human
ugggugcaguggcucacaccu

SEQ ID NO: 525970 - RNA, 24 nt, Human
ugggugcaguggcucacaccugua

SEQ ID NO: 525971 - RNA, 24 nt, Human
ugggugcaguggcucacaccugug

SEQ ID NO: 525972 - RNA, 24 nt, Human
ugggugcaguggcucacacuugua

SEQ ID NO: 525973 - RNA, 24 nt, Human
ugggugcaguggcucacaucugua

SEQ ID NO: 525974 - RNA, 24 nt, Human
ugggugcaguggcucacgccugua

SEQ ID NO: 525975 - RNA, 24 nt, Human
ugggugcaguggcucacuccugua

SEQ ID NO: 525976 - RNA, 24 nt, Human
ugggugcaguggcucaggccugua

SEQ ID NO: 525977 - RNA, 21 nt, Human
ugggugcaguggcucaugccu

SEQ ID NO: 525978 - RNA, 24 nt, Human
ugggugcaguggcucaugccugua

SEQ ID NO: 525979 - RNA, 24 nt, Human
ugggugcaguggcucuugccugua

SEQ ID NO: 525980 - RNA, 24 nt, Human
ugggugcagugguauauaccugua

SEQ ID NO: 525981 - RNA, 24 nt, Human
ugggugcaguggugcaugccugua

SEQ ID NO: 525982 - RNA, 26 nt, Human
ugggugcaguggugcgcaugccugua

SEQ ID NO: 525983 - RNA, 24 nt, Human
ugggugcagugguucacaccugua

SEQ ID NO: 525984 - RNA, 32 nt, Human
ugggugcauggagccccaguagacagaaagug

SEQ ID NO: 525985 - RNA, 32 nt, Human
ugggugcaugugggaacucuucuuuagggcuu

SEQ ID NO: 525986 - RNA, 32 nt, Human
ugggugccaccuggacuccacucuccccucuc

SEQ ID NO: 525987 - RNA, 32 nt, Human
ugggugccagagaggcggaagaggaggccuga

SEQ ID NO: 525988 - RNA, 32 nt, Human
ugggugccagcccucaguguggcuuugugauu

SEQ ID NO: 525989 - RNA, 23 nt, Human
ugggugccagcucagcagccccc

SEQ ID NO: 525990 - RNA, 20 nt, Human
ugggugccauuugagcccag

SEQ ID NO: 525991 - RNA, 21 nt, Human
ugggugcccaaguucacggag

SEQ ID NO: 525992 - RNA, 22 nt, Human
ugggugccccaggaccacagga

SEQ ID NO: 525993 - RNA, 32 nt, Human
ugggugccccugaccccuuggcaccggauaca

SEQ ID NO: 525994 - RNA, 32 nt, Human
ugggugcccggccuggaacacagguucugucu

SEQ ID NO: 525995 - RNA, 24 nt, Human
ugggugccguggcucacaccugua

SEQ ID NO: 525996 - RNA, 24 nt, Human
ugggugccguggcucacgccugua

SEQ ID NO: 525997 - RNA, 31 nt, Human
ugggugccuaucugggccacaagugagucaa

SEQ ID NO: 525998 - RNA, 32 nt, Human
ugggugccuccugcaguuugggagacauggac

SEQ ID NO: 525999 - RNA, 32 nt, Human
ugggugccugaauucaugcgugucagucaccc

SEQ ID NO: 526000 - RNA, 18 nt, Human
ugggugccuguaauccca

SEQ ID NO: 526001 - RNA, 32 nt, Human
ugggugccuguaaucccagcuacuugggaagc

SEQ ID NO: 526002 - RNA, 32 nt, Human
ugggugccuguaaucccagcuacuugggaggc

SEQ ID NO: 526003 - RNA, 32 nt, Human
ugggugccuguaaucccaguuacuugggaggc

SEQ ID NO: 526004 - RNA, 32 nt, Human
ugggugccuguaauccuagcuacuugggaggc

SEQ ID NO: 526005 - RNA, 20 nt, Human
ugggugccugugaagccugg

SEQ ID NO: 526006 - RNA, 32 nt, Human
ugggugccugugguuggagcuguggagguguc

SEQ ID NO: 526007 - RNA, 32 nt, Human
ugggugccuugcuuuguucuucccaagcuguu

SEQ ID NO: 526008 - RNA, 32 nt, Human
ugggugcgcagccggcccugcgcccgcgacgc

SEQ ID NO: 526009 - RNA, 26 nt, Human
ugggugcgcuguggcucaugccugua

SEQ ID NO: 526010 - RNA, 32 nt, Human
ugggugcggauccagcggacgaaucccgaggc

SEQ ID NO: 526011 - RNA, 24 nt, Human
ugggugcggugacucaugccugua

SEQ ID NO: 526012 - RNA, 24 nt, Human
ugggugcgguggcacaugccugua

SEQ ID NO: 526013 - RNA, 24 nt, Human
ugggugcgguggcaggugccugua

SEQ ID NO: 526014 - RNA, 23 nt, Human
ugggugcgguggcucacaccugu

SEQ ID NO: 526015 - RNA, 24 nt, Human
ugggugcgguggcucacaccugua

SEQ ID NO: 526016 - RNA, 24 nt, Human
ugggugcgguggcucacgccugua

SEQ ID NO: 526017 - RNA, 24 nt, Human
ugggugcgguggcucacgcuugua

SEQ ID NO: 526018 - RNA, 24 nt, Human
ugggugcgguggcucacgucugua

SEQ ID NO: 526019 - RNA, 24 nt, Human
ugggugcgguggcucaugcacgua

SEQ ID NO: 526020 - RNA, 24 nt, Human
ugggugcgguggcucaugccugua

SEQ ID NO: 526021 - RNA, 24 nt, Human
ugggugcgguggcucaugccugug

SEQ ID NO: 526022 - RNA, 24 nt, Human
ugggugcgguggcucaugucugua

SEQ ID NO: 526023 - RNA, 24 nt, Human
ugggugcgguggcuuacaccugua

SEQ ID NO: 526024 - RNA, 21 nt, Human
ugggugcggugguucaugccu

SEQ ID NO: 526025 - RNA, 32 nt, Human
ugggugcgucccaucuccccagcuugcugcuc

SEQ ID NO: 526026 - RNA, 32 nt, Human
ugggugcuccugggaugggaccagccuccucc

SEQ ID NO: 526027 - RNA, 32 nt, Human
ugggugcugcuagaggguguggaaaagaccaa

SEQ ID NO: 526028 - RNA, 32 nt, Human
ugggugcugcuggccuccaagcuggcaguggg

SEQ ID NO: 526029 - RNA, 32 nt, Human
ugggugcugcuugaugugaaugaggucccgca

SEQ ID NO: 526030 - RNA, 32 nt, Human
ugggugcuggagcaggggaggaaagggcuuug

SEQ ID NO: 526031 - RNA, 32 nt, Human
ugggugcuggcuggugggaugggggagggugg

SEQ ID NO: 526032 - RNA, 32 nt, Human
ugggugcugggaaccaggaagagugggggaag

SEQ ID NO: 526033 - RNA, 32 nt, Human
ugggugcugggaagggaggguugaaaccaccg

SEQ ID NO: 526034 - RNA, 32 nt, Human
ugggugcugugcccuagggccuggguggcagg

SEQ ID NO: 526035 - RNA, 22 nt, Human
ugggugcuguggcucacgccug

SEQ ID NO: 526036 - RNA, 24 nt, Human
ugggugcuguggcucacgccugua

SEQ ID NO: 526037 - RNA, 24 nt, Human
ugggugcuguggcucaugccugua

SEQ ID NO: 526038 - RNA, 32 nt, Human
ugggugcuucucucccugcaggcuggccacuc

SEQ ID NO: 526039 - RNA, 32 nt, Human
ugggugcuuguugggccuuuuuccaguaagga

SEQ ID NO: 526040 - RNA, 32 nt, Human
uggguggaagggacccuccucacuggauggug

SEQ ID NO: 526041 - RNA, 32 nt, Human
uggguggacacagcaagaaggcccucaucaga

SEQ ID NO: 526042 - RNA, 32 nt, Human
uggguggagagggaggggauaagagaggugca

SEQ ID NO: 526043 - RNA, 32 nt, Human
uggguggagcaaugugcucuggggagaaagcu

SEQ ID NO: 526044 - RNA, 32 nt, Human
uggguggaggagagaguggcacccucugauug

SEQ ID NO: 526045 - RNA, 32 nt, Human
uggguggaggggcuggggguacacacagcuca

SEQ ID NO: 526046 - RNA, 32 nt, Human
uggguggagggugaguuugaagagguucugau

SEQ ID NO: 526047 - RNA, 24 nt, Human
uggguggaguggcucauaccugua

SEQ ID NO: 526048 - RNA, 23 nt, Human
uggguggaucaccugagaucagg

SEQ ID NO: 526049 - RNA, 23 nt, Human
uggguggaucaccugagcucagg

SEQ ID NO: 526050 - RNA, 23 nt, Human
uggguggaucaccugaggucagg

SEQ ID NO: 526051 - RNA, 23 nt, Human
uggguggaucacuugaagucagg

SEQ ID NO: 526052 - RNA, 23 nt, Human
uggguggaucacuugagcucagg

SEQ ID NO: 526053 - RNA, 18 nt, Human
uggguggaucacuugagg

SEQ ID NO: 526054 - RNA, 23 nt, Human
uggguggaucacuugaggucagg

SEQ ID NO: 526055 - RNA, 32 nt, Human
uggguggaucacuugaguucaggaguucgaga

SEQ ID NO: 526056 - RNA, 32 nt, Human
uggguggaugcagugguccaggacuggggucu

SEQ ID NO: 526057 - RNA, 23 nt, Human
uggguggauuaccugaggucagg

SEQ ID NO: 526058 - RNA, 21 nt, Human
uggguggauuagcuaccccag

SEQ ID NO: 526059 - RNA, 23 nt, Human
uggguggauucuggaaccucagg

SEQ ID NO: 526060 - RNA, 23 nt, Human
uggguggauugcuugagcccagg

SEQ ID NO: 526061 - RNA, 19 nt, Human
uggguggauuuagccaagg

SEQ ID NO: 526062 - RNA, 32 nt, Human
uggguggcaaacuuuuucugcaaaggaucagc

SEQ ID NO: 526063 - RNA, 32 nt, Human
uggguggcaagaacaucuaugcuaguggccac

SEQ ID NO: 526064 - RNA, 32 nt, Human
uggguggcaauuccagcuuagcaacgcagaag

SEQ ID NO: 526065 - RNA, 19 nt, Human
uggguggcacaucccaaga

SEQ ID NO: 526066 - RNA, 17 nt, Human
uggguggcagagccaga

SEQ ID NO: 526067 - RNA, 32 nt, Human
uggguggcaggauaugaaggaagcuguaggca

SEQ ID NO: 526068 - RNA, 31 nt, Human
uggguggcaugucucucucuaccucauuuuu

SEQ ID NO: 526069 - RNA, 32 nt, Human
uggguggccauggaggagcccccugugcgaga

SEQ ID NO: 526070 - RNA, 32 nt, Human
uggguggcccagguccauccugggcagcaaag

SEQ ID NO: 526071 - RNA, 32 nt, Human
uggguggcccucagguguaacugugucugaga

SEQ ID NO: 526072 - RNA, 18 nt, Human
uggguggccggagccgga

SEQ ID NO: 526073 - RNA, 32 nt, Human
uggguggccuaaguucacagggagguaauggg

SEQ ID NO: 526074 - RNA, 32 nt, Human
uggguggccuaugauggaugggggcucugugg

SEQ ID NO: 526075 - RNA, 32 nt, Human
uggguggccucagggauaggcgcuccccaagg

SEQ ID NO: 526076 - RNA, 32 nt, Human
uggguggccuccaggcucaaugcagaaacccc

SEQ ID NO: 526077 - RNA, 32 nt, Human
uggguggccugcuccccugccugggcccugac

SEQ ID NO: 526078 - RNA, 32 nt, Human
uggguggccugugauggaugggggcucugugg

SEQ ID NO: 526079 - RNA, 19 nt, Human
uggguggcucauacgugua

SEQ ID NO: 526080 - RNA, 18 nt, Human
uggguggcugcuguccac

SEQ ID NO: 526081 - RNA, 32 nt, Human
uggguggcuuaggccuucaaauugagcuuggg

SEQ ID NO: 526082 - RNA, 32 nt, Human
ugggugggaccgggacagaaagacuuacaugg

SEQ ID NO: 526083 - RNA, 32 nt, Human
ugggugggacuaggaacucagcuuccggucca

SEQ ID NO: 526084 - RNA, 32 nt, Human
ugggugggacuugugacccuacccugucaggc

SEQ ID NO: 526085 - RNA, 32 nt, Human
ugggugggagacaaauuuuaccuggcugaucu

SEQ ID NO: 526086 - RNA, 32 nt, Human
ugggugggagagggggagucucacggggcccc

SEQ ID NO: 526087 - RNA, 32 nt, Human
ugggugggaggagcagccgagugaagaagggg

SEQ ID NO: 526088 - RNA, 32 nt, Human
ugggugggaggugagauugauagugcaguaau

SEQ ID NO: 526089 - RNA, 32 nt, Human
ugggugggagugagacuggguagaauguuacu

SEQ ID NO: 526090 - RNA, 18 nt, Human
ugggugggcaaggccagg

SEQ ID NO: 526091 - RNA, 32 nt, Human
ugggugggcacagugggugugccugagcauuc

SEQ ID NO: 526092 - RNA, 32 nt, Human
ugggugggcauuucacgggaaggguugguaug

SEQ ID NO: 526093 - RNA, 32 nt, Human
ugggugggcuauaauccagcacuuuaggaggc

SEQ ID NO: 526094 - RNA, 31 nt, Human
ugggugggcucugagcaccuguugggggcuu

SEQ ID NO: 526095 - RNA, 32 nt, Human
ugggugggcugaguggaggugccugggagcug

SEQ ID NO: 526096 - RNA, 32 nt, Human
uggguggggaaaggaaguggcuuugaggcaca

SEQ ID NO: 526097 - RNA, 32 nt, Human
uggguggggaggaucaauuagagaggaggcac

SEQ ID NO: 526098 - RNA, 32 nt, Human
uggguggggcagaggccaggaggggaccuggu

SEQ ID NO: 526099 - RNA, 32 nt, Human
uggguggggcagccccaagccuccuggggagg

SEQ ID NO: 526100 - RNA, 32 nt, Human
uggguggggcaggaugggugcccacaccccua

SEQ ID NO: 526101 - RNA, 32 nt, Human
uggguggggccaaagaggaggcuucuauugau

SEQ ID NO: 526102 - RNA, 32 nt, Human
uggguggggccugagauucugcauuuuuccca

SEQ ID NO: 526103 - RNA, 32 nt, Human
uggguggggcuggaggagcaggggugcauccc

SEQ ID NO: 526104 - RNA, 32 nt, Human
uggguggggcuggggacacaacaaugacugag

SEQ ID NO: 526105 - RNA, 32 nt, Human
ugggugggggaagucccuccccaaccacuuaa

SEQ ID NO: 526106 - RNA, 32 nt, Human
ugggugggggacagagccagauucagaguaau

SEQ ID NO: 526107 - RNA, 32 nt, Human
ugggugggggagcagguuggagaggggaccaa

SEQ ID NO: 526108 - RNA, 32 nt, Human
ugggugggggcagccuccaccuccuggauuca

SEQ ID NO: 526109 - RNA, 32 nt, Human
ugggugggggcuaccacccacccucucagucu

SEQ ID NO: 526110 - RNA, 32 nt, Human
uggguggggugagccccaggaggaaguuggga

SEQ ID NO: 526111 - RNA, 32 nt, Human
uggguggggugagggccaaaggcuaugguuuc

SEQ ID NO: 526112 - RNA, 32 nt, Human
uggguggggugaggggugagcagccauagaag

SEQ ID NO: 526113 - RNA, 30 nt, Human
uggguggggugccacagggcgggguucagg

SEQ ID NO: 526114 - RNA, 32 nt, Human
ugggugggucggagcccaggaggcagcugggg

SEQ ID NO: 526115 - RNA, 32 nt, Human
ugggugggucugcagaucucacaccacagaca

SEQ ID NO: 526116 - RNA, 32 nt, Human
ugggugggugaggccagaagagacugccuccg

SEQ ID NO: 526117 - RNA, 32 nt, Human
ugggugggugccuggcugugugcagugaggag

SEQ ID NO: 526118 - RNA, 18 nt, Human
uggguggguggacccagg

SEQ ID NO: 526119 - RNA, 32 nt, Human
uggguggguggagggcaggcagguggcugggu

SEQ ID NO: 526120 - RNA, 32 nt, Human
uggguggguggcaggcugggccuagcacuugc

SEQ ID NO: 526121 - RNA, 32 nt, Human
ugggugguagguguggggagagcugcugaaac

SEQ ID NO: 526122 - RNA, 32 nt, Human
ugggugguccaguuuggacugaugggaaucuu

SEQ ID NO: 526123 - RNA, 32 nt, Human
uggguggugagauguggacucugauccuuaau

SEQ ID NO: 526124 - RNA, 32 nt, Human
uggguggugccugugccugacacuccugcccu

SEQ ID NO: 526125 - RNA, 32 nt, Human
ugggugguggaggugggcaguggcaccaugac

SEQ ID NO: 526126 - RNA, 32 nt, Human
ugggugguggccaggugacauuuucugugcgu

SEQ ID NO: 526127 - RNA, 32 nt, Human
uggguggugggaugggagaccauccucagccc

SEQ ID NO: 526128 - RNA, 32 nt, Human
uggguggugggugggguggggugggcauggaa

SEQ ID NO: 526129 - RNA, 32 nt, Human
ugggugguguuucugugcagacaugcuggguc

SEQ ID NO: 526130 - RNA, 32 nt, Human
ugggugguuaagggagugggacccuggcuugc

SEQ ID NO: 526131 - RNA, 32 nt, Human
ugggugguugucuauuugucugucuucagucu

SEQ ID NO: 526132 - RNA, 24 nt, Human
uggguguaacggcggaugccugua

SEQ ID NO: 526133 - RNA, 32 nt, Human
uggguguaauaggggauuagccccagaaggga

SEQ ID NO: 526134 - RNA, 32 nt, Human
uggguguaaugccagguggaaugguuucaaca

SEQ ID NO: 526135 - RNA, 32 nt, Human
uggguguacugagucccugaaucuuuuggccc

SEQ ID NO: 526136 - RNA, 32 nt, Human
uggguguagcagaaaaaggcugugcugcccug

SEQ ID NO: 526137 - RNA, 24 nt, Human
uggguguaguggcgggugccugua

SEQ ID NO: 526138 - RNA, 32 nt, Human
uggguguauacagccccucccccacauacaca

SEQ ID NO: 526139 - RNA, 32 nt, Human
uggguguauaccagggacagguguugcugugc

SEQ ID NO: 526140 - RNA, 32 nt, Human
ugggugucaaugcuuauuagguauccagccgg

SEQ ID NO: 526141 - RNA, 32 nt, Human
ugggugucacccucagcuucucaggccugcag

SEQ ID NO: 526142 - RNA, 32 nt, Human
ugggugucaggcugggguuagugagcagguua

SEQ ID NO: 526143 - RNA, 32 nt, Human
ugggugucaucagccccugccucccaggccag

SEQ ID NO: 526144 - RNA, 32 nt, Human
uggguguccaggccauggggcagcccugggcg

SEQ ID NO: 526145 - RNA, 32 nt, Human
uggguguccccucauccccaguagccucuuuc

SEQ ID NO: 526146 - RNA, 22 nt, Human
ugggugucccuggcucugugag

SEQ ID NO: 526147 - RNA, 32 nt, Human
uggguguccucaacagugaauucacugucugc

SEQ ID NO: 526148 - RNA, 32 nt, Human
uggguguccucccagggagcuucucuucucaa

SEQ ID NO: 526149 - RNA, 32 nt, Human
ugggugucucagguucuguguguccuugugug

SEQ ID NO: 526150 - RNA, 32 nt, Human
ugggugucucuagccucaaagauggccagcug

SEQ ID NO: 526151 - RNA, 32 nt, Human
ugggugucugggaacugccucccucaucugug

SEQ ID NO: 526152 - RNA, 32 nt, Human
ugggugucuuaggaugaugguuaggaacauug

SEQ ID NO: 526153 - RNA, 32 nt, Human
ugggugugacaucagaguauuugaccugcagu

SEQ ID NO: 526154 - RNA, 32 nt, Human
ugggugugagccaccaccagucaacaaaauac

SEQ ID NO: 526155 - RNA, 32 nt, Human
ugggugugagccaccgcgccuggccuauacau

SEQ ID NO: 526156 - RNA, 32 nt, Human
ugggugugagccacugucaugccuggccucgu

SEQ ID NO: 526157 - RNA, 32 nt, Human
ugggugugagccagccgcguggcccugggcaa

SEQ ID NO: 526158 - RNA, 24 nt, Human
ugggugugaugauacaugccugua

SEQ ID NO: 526159 - RNA, 24 nt, Human
ugggugugauggcucacgccugua

SEQ ID NO: 526160 - RNA, 20 nt, Human
ugggugugauggcucaugcc

SEQ ID NO: 526161 - RNA, 24 nt, Human
ugggugugaugguggcucagaccu

SEQ ID NO: 526162 - RNA, 32 nt, Human
ugggugugcuuggcccacagggccugguggug

SEQ ID NO: 526163 - RNA, 24 nt, Human
uggguguggaggcucacaccugua

SEQ ID NO: 526164 - RNA, 22 nt, Human
uggguguggcaguggaccugug

SEQ ID NO: 526165 - RNA, 32 nt, Human
uggguguggccaaaaacaauuuucuuuauucu

SEQ ID NO: 526166 - RNA, 21 nt, Human
uggguguggcggcucaugccu

SEQ ID NO: 526167 - RNA, 32 nt, Human
ugggugugggcccuuauugcagcugucucaca

SEQ ID NO: 526168 - RNA, 24 nt, Human
ugggugugggggugcacaccugua

SEQ ID NO: 526169 - RNA, 32 nt, Human
uggguguggggucgcgcauuuucuucaaccag

SEQ ID NO: 526170 - RNA, 31 nt, Human
uggguguggguggaagggcugggugucgaaa

SEQ ID NO: 526171 - RNA, 32 nt, Human
ugggugugguaccaaggcccuggcucugggca

SEQ ID NO: 526172 - RNA, 24 nt, Human
ugggugugguagcacgcacccgua

SEQ ID NO: 526173 - RNA, 24 nt, Human
ugggugugguagcucguggcugua

SEQ ID NO: 526174 - RNA, 24 nt, Human
uggguguggugacacgcaccugua

SEQ ID NO: 526175 - RNA, 24 nt, Human
uggguguggugacgcuugccugua

SEQ ID NO: 526176 - RNA, 32 nt, Human
uggguguggugagggaggggacauauccuagg

SEQ ID NO: 526177 - RNA, 21 nt, Human
uggguguggugauucagccug

SEQ ID NO: 526178 - RNA, 24 nt, Human
uggguguggugccacaugccugua

SEQ ID NO: 526179 - RNA, 24 nt, Human
ugggugugguggcacacacccgua

SEQ ID NO: 526180 - RNA, 24 nt, Human
ugggugugguggcacacaccugua

SEQ ID NO: 526181 - RNA, 24 nt, Human
ugggugugguggcacacaccugug

SEQ ID NO: 526182 - RNA, 24 nt, Human
ugggugugguggcacacgccugua

SEQ ID NO: 526183 - RNA, 20 nt, Human
ugggugugguggcacaugcc

SEQ ID NO: 526184 - RNA, 24 nt, Human
ugggugugguggcacaugccugua

SEQ ID NO: 526185 - RNA, 24 nt, Human
ugggugugguggcacgcaccugua

SEQ ID NO: 526186 - RNA, 23 nt, Human
ugggugugguggcacgugccugu

SEQ ID NO: 526187 - RNA, 24 nt, Human
ugggugugguggcacgugccugua

SEQ ID NO: 526188 - RNA, 24 nt, Human
ugggugugguggcacgugccugug

SEQ ID NO: 526189 - RNA, 24 nt, Human
ugggugugguggcacucaccugua

SEQ ID NO: 526190 - RNA, 24 nt, Human
ugggugugguggcagacagcugua

SEQ ID NO: 526191 - RNA, 24 nt, Human
ugggugugguggcagaggccugua

SEQ ID NO: 526192 - RNA, 24 nt, Human
ugggugugguggcaggagccugua

SEQ ID NO: 526193 - RNA, 24 nt, Human
ugggugugguggcagucaccugua

SEQ ID NO: 526194 - RNA, 24 nt, Human
ugggugugguggcauacgccugua

SEQ ID NO: 526195 - RNA, 24 nt, Human
ugggugugguggcaugcaccugua

SEQ ID NO: 526196 - RNA, 24 nt, Human
ugggugugguggcaugcgcaugua

SEQ ID NO: 526197 - RNA, 24 nt, Human
ugggugugguggcaugcgccugua

SEQ ID NO: 526198 - RNA, 21 nt, Human
ugggugugguggcaugugccu

SEQ ID NO: 526199 - RNA, 22 nt, Human
ugggugugguggcaugugccug

SEQ ID NO: 526200 - RNA, 29 nt, Human
ugggugugguggcaugugccuggaguccc

SEQ ID NO: 526201 - RNA, 24 nt, Human
ugggugugguggcgcaccccugua

SEQ ID NO: 526202 - RNA, 24 nt, Human
ugggugugguggcgcauaccugug

SEQ ID NO: 526203 - RNA, 24 nt, Human
ugggugugguggcgcaugccugua

SEQ ID NO: 526204 - RNA, 24 nt, Human
ugggugugguggcgcgcaccugua

SEQ ID NO: 526205 - RNA, 24 nt, Human
ugggugugguggcgcgugccugua

SEQ ID NO: 526206 - RNA, 23 nt, Human
ugggugugguggcggcgccugua

SEQ ID NO: 526207 - RNA, 24 nt, Human
ugggugugguggcgggcaccugua

SEQ ID NO: 526208 - RNA, 23 nt, Human
ugggugugguggcgggcgcccgu

SEQ ID NO: 526209 - RNA, 24 nt, Human
ugggugugguggcgggcgccugua

SEQ ID NO: 526210 - RNA, 24 nt, Human
ugggugugguggcgggugccugua

SEQ ID NO: 526211 - RNA, 24 nt, Human
ugggugugguggcgugcaccugua

SEQ ID NO: 526212 - RNA, 24 nt, Human
ugggugugguggcgugcgccugua

SEQ ID NO: 526213 - RNA, 24 nt, Human
ugggugugguggcgugugccugua

SEQ ID NO: 526214 - RNA, 24 nt, Human
ugggugugguggcgugugccugug

SEQ ID NO: 526215 - RNA, 24 nt, Human
ugggugugguggcucaagccugua

SEQ ID NO: 526216 - RNA, 20 nt, Human
ugggugugguggcucacacc

SEQ ID NO: 526217 - RNA, 22 nt, Human
ugggugugguggcucacaccug

SEQ ID NO: 526218 - RNA, 24 nt, Human
ugggugugguggcucacaccugua

SEQ ID NO: 526219 - RNA, 24 nt, Human
ugggugugguggcucacacuugua

SEQ ID NO: 526220 - RNA, 21 nt, Human
ugggugugguggcucacgccu

SEQ ID NO: 526221 - RNA, 24 nt, Human
ugggugugguggcucacgccugua

SEQ ID NO: 526222 - RNA, 24 nt, Human
ugggugugguggcucauaccugua

SEQ ID NO: 526223 - RNA, 24 nt, Human
ugggugugguggcucaugccugua

SEQ ID NO: 526224 - RNA, 21 nt, Human
ugggugugguggcucccaccu

SEQ ID NO: 526225 - RNA, 21 nt, Human
uggguguggugggcaccugua

SEQ ID NO: 526226 - RNA, 24 nt, Human
ugggugugguggggggcacccgua

SEQ ID NO: 526227 - RNA, 24 nt, Human
ugggugugguggggggcaccugua

SEQ ID NO: 526228 - RNA, 24 nt, Human
ugggugugguggugcacaccugua

SEQ ID NO: 526229 - RNA, 24 nt, Human
ugggugugguggugcacgccugua

SEQ ID NO: 526230 - RNA, 24 nt, Human
ugggugugguggugcacuccugua

SEQ ID NO: 526231 - RNA, 24 nt, Human
ugggugugguggugcaugccugua

SEQ ID NO: 526232 - RNA, 24 nt, Human
ugggugugguggugggcaccugua

SEQ ID NO: 526233 - RNA, 23 nt, Human
ugggugugguggugugaucugua

SEQ ID NO: 526234 - RNA, 22 nt, Human
uggguguggugucacaugccug

SEQ ID NO: 526235 - RNA, 24 nt, Human
ugggugugguugcacacgccugua

SEQ ID NO: 526236 - RNA, 32 nt, Human
uggguguguaccacugccucuggcuuuauuuu

SEQ ID NO: 526237 - RNA, 19 nt, Human
uggguguguaccauaccug

SEQ ID NO: 526238 - RNA, 32 nt, Human
uggguguguaugugugcauuuuccacacuuuu

SEQ ID NO: 526239 - RNA, 32 nt, Human
ugggugugugaaauuccagagcuuugggggag

SEQ ID NO: 526240 - RNA, 31 nt, Human
ugggugugugagagagcggcugguucauugu

SEQ ID NO: 526241 - RNA, 32 nt, Human
ugggugugugaguggcuaugauccuaguuguc

SEQ ID NO: 526242 - RNA, 32 nt, Human
ugggugugugggcagucucgggucucucggga

SEQ ID NO: 526243 - RNA, 31 nt, Human
uggguguucaauaaagaaccauuuggagaug

SEQ ID NO: 526244 - RNA, 32 nt, Human
uggguguucacuuuuuccuuuuugauugaaua

SEQ ID NO: 526245 - RNA, 32 nt, Human
uggguguucucaguccuugccaugaaguaugg

SEQ ID NO: 526246 - RNA, 32 nt, Human
uggguguucugccuccacuccuuacugccaag

SEQ ID NO: 526247 - RNA, 32 nt, Human
uggguguugcucccuuauccccaaaucacucu

SEQ ID NO: 526248 - RNA, 32 nt, Human
uggguguuggcacccagccacuauucugccaa

SEQ ID NO: 526249 - RNA, 32 nt, Human
uggguguuuaaaggacaaauagcugcuagaau

SEQ ID NO: 526250 - RNA, 32 nt, Human
uggguguuugggaaaggcagggcccugaaaug

SEQ ID NO: 526251 - RNA, 32 nt, Human
uggguguuuuagcauuacuguguaaagacuug

SEQ ID NO: 526252 - RNA, 32 nt, Human
uggguguuuuucuucuguggugagugaaacaa

SEQ ID NO: 526253 - RNA, 32 nt, Human
uggguuaaaguuaugguuccagaagcuuccaa

SEQ ID NO: 526254 - RNA, 32 nt, Human
uggguuaacaggauugccgacagaucaggccc

SEQ ID NO: 526255 - RNA, 32 nt, Human
uggguuacacaaaagaauucacagaugguaaa

SEQ ID NO: 526256 - RNA, 32 nt, Human
uggguuacaccuguaaucccagcacuuuggga

SEQ ID NO: 526257 - RNA, 32 nt, Human
uggguuacugcaaccucugccccucgggauuc

SEQ ID NO: 526258 - RNA, 32 nt, Human
uggguuagagcuagagagaaggccccaagcuu

SEQ ID NO: 526259 - RNA, 32 nt, Human
uggguuaggcugucccagcugucugaguguuu

SEQ ID NO: 526260 - RNA, 32 nt, Human
uggguuagugugaaaaagaguuuggcugauuc

SEQ ID NO: 526261 - RNA, 32 nt, Human
uggguuauccuaggaagagguuacuccuaaua

SEQ ID NO: 526262 - RNA, 32 nt, Human
uggguuaucuggcuccaaaaccccuguccuuu

SEQ ID NO: 526263 - RNA, 32 nt, Human
uggguuaugggaugugggcaucccuggguucu

SEQ ID NO: 526264 - RNA, 32 nt, Human
uggguuauuggcaaagaagcaaacaggacaca

SEQ ID NO: 526265 - RNA, 32 nt, Human
uggguucaagcaauccucccaccucggccucc

SEQ ID NO: 526266 - RNA, 32 nt, Human
uggguucaagcaauucucccaccucagcuggg

SEQ ID NO: 526267 - RNA, 32 nt, Human
uggguucaagccaucccuccugccucagccuc

SEQ ID NO: 526268 - RNA, 32 nt, Human
uggguucaagccauccucccaccucagccucc

SEQ ID NO: 526269 - RNA, 32 nt, Human
uggguucaagcgauccucccacuucagccuuu

SEQ ID NO: 526270 - RNA, 32 nt, Human
uggguucaagcgauucucccaccccagccucc

SEQ ID NO: 526271 - RNA, 32 nt, Human
uggguucaagcuauucugccucagccucccaa

SEQ ID NO: 526272 - RNA, 32 nt, Human
uggguucaaguaacccucccaccucagcuuuc

SEQ ID NO: 526273 - RNA, 32 nt, Human
uggguucaaguaauccucccaccucagccucc

SEQ ID NO: 526274 - RNA, 32 nt, Human
uggguucaauuuaaaauaggagaggcuuucuc

SEQ ID NO: 526275 - RNA, 32 nt, Human
uggguucacaccaucacccuuucuucccucua

SEQ ID NO: 526276 - RNA, 32 nt, Human
uggguucacaccauucuccugccucagccucc

SEQ ID NO: 526277 - RNA, 32 nt, Human
uggguucacaccauucucuugccucagccucc

SEQ ID NO: 526278 - RNA, 31 nt, Human
uggguucacagcuggacugggagcagcagac

SEQ ID NO: 526279 - RNA, 31 nt, Human
uggguucacagcuguggggacccaggcaggc

SEQ ID NO: 526280 - RNA, 32 nt, Human
uggguucacgccauucucccaccucagcuucc

SEQ ID NO: 526281 - RNA, 32 nt, Human
uggguucacugcaaccuccgccucuuggguuc

SEQ ID NO: 526282 - RNA, 32 nt, Human
uggguucacugcaaccucugccuccagguuca

SEQ ID NO: 526283 - RNA, 32 nt, Human
uggguucagaacaggugcaugagccccacagc

SEQ ID NO: 526284 - RNA, 32 nt, Human
uggguucaggcaauucucccaccucagccucc

SEQ ID NO: 526285 - RNA, 32 nt, Human
uggguucagggagggguuggagcagugcuggg

SEQ ID NO: 526286 - RNA, 32 nt, Human
uggguucauauuccucuucaauucugcugucu

SEQ ID NO: 526287 - RNA, 32 nt, Human
uggguucaugccauucuccugccucagccucc

SEQ ID NO: 526288 - RNA, 32 nt, Human
uggguucaugccauucuccugccucagucucc

SEQ ID NO: 526289 - RNA, 32 nt, Human
uggguucaugccauucuccugccucggccuuc

SEQ ID NO: 526290 - RNA, 32 nt, Human
uggguucaugccauucuccugcuucagccucc

SEQ ID NO: 526291 - RNA, 32 nt, Human
uggguucaugccauuuuccugccucagccucc

SEQ ID NO: 526292 - RNA, 32 nt, Human
uggguucauucaauaaacacuuacugagcacc

SEQ ID NO: 526293 - RNA, 32 nt, Human
uggguucauucaauaaacacuuacugagcacg

SEQ ID NO: 526294 - RNA, 32 nt, Human
uggguuccaaucccagcucugccuuugaagca

SEQ ID NO: 526295 - RNA, 32 nt, Human
uggguuccagcccccuuucccuuccuccuccu

SEQ ID NO: 526296 - RNA, 32 nt, Human
uggguuccaucucugucuccagccugcccacu

SEQ ID NO: 526297 - RNA, 32 nt, Human
uggguuccauuccuaacucugccucaaacugu

SEQ ID NO: 526298 - RNA, 32 nt, Human
uggguuccauuuggugggugggggaggaaguu

SEQ ID NO: 526299 - RNA, 32 nt, Human
uggguucccuuuccuuccaucccuacccccua

SEQ ID NO: 526300 - RNA, 32 nt, Human
uggguucccuuuccuucccaccccuguggcca

SEQ ID NO: 526301 - RNA, 32 nt, Human
uggguuccuugggaggaaguuguaguggugau

SEQ ID NO: 526302 - RNA, 32 nt, Human
uggguucgagguggaggcugcagcugaaggug

SEQ ID NO: 526303 - RNA, 32 nt, Human
uggguucgcucucagcucugcagcugucugcg

SEQ ID NO: 526304 - RNA, 32 nt, Human
uggguucuacagccuugucccccucccccuca

SEQ ID NO: 526305 - RNA, 32 nt, Human
uggguucuagggaacagauugaccccaaacau

SEQ ID NO: 526306 - RNA, 32 nt, Human
uggguucuaugcacgacuucagccuggagagg

SEQ ID NO: 526307 - RNA, 32 nt, Human
uggguucuccucagugagggaucccugcccug

SEQ ID NO: 526308 - RNA, 32 nt, Human
uggguucucggugugcagaggcuguagagaga

SEQ ID NO: 526309 - RNA, 32 nt, Human
uggguucugcauguguuccuggcagcugggcc

SEQ ID NO: 526310 - RNA, 32 nt, Human
uggguucugccgaacccuccucucacaggaag

SEQ ID NO: 526311 - RNA, 32 nt, Human
uggguucuguuucuccccuuggcugccuguaa

SEQ ID NO: 526312 - RNA, 32 nt, Human
uggguucuugugccuuccccucccgggcccag

SEQ ID NO: 526313 - RNA, 32 nt, Human
uggguucuuuacugcuggaucgcagguugggg

SEQ ID NO: 526314 - RNA, 32 nt, Human
uggguucuuugcugaaauuauaguugaauggc

SEQ ID NO: 526315 - RNA, 32 nt, Human
uggguugaacuauguuccucagaaagauaugu

SEQ ID NO: 526316 - RNA, 32 nt, Human
uggguugaauacaaguuuccaaaacuuuaaaa

SEQ ID NO: 526317 - RNA, 32 nt, Human
uggguugacaccauuuuccugccucagccucc

SEQ ID NO: 526318 - RNA, 32 nt, Human
uggguugacaggagcagcaaaccaccauggca

SEQ ID NO: 526319 - RNA, 32 nt, Human
uggguugacaggugcagcaaaccaccauggca

SEQ ID NO: 526320 - RNA, 32 nt, Human
uggguugacaugcacacaacaccauuuucauu

SEQ ID NO: 526321 - RNA, 32 nt, Human
uggguugagagggagcagcagguaacugcgca

SEQ ID NO: 526322 - RNA, 32 nt, Human
uggguugagggaagagcuaucuggccuugggg

SEQ ID NO: 526323 - RNA, 32 nt, Human
uggguugaucaccuagaggagcucuggcuaag

SEQ ID NO: 526324 - RNA, 32 nt, Human
uggguugcaauacaaacugcucuugacaauga

SEQ ID NO: 526325 - RNA, 32 nt, Human
uggguugcagaggcaggcugcaucccggaauc

SEQ ID NO: 526326 - RNA, 32 nt, Human
uggguugcaggaggaggagcugggcagggccu

SEQ ID NO: 526327 - RNA, 32 nt, Human
uggguugcagugagccgagaucaugccacugc

SEQ ID NO: 526328 - RNA, 32 nt, Human
uggguugcagugagccgagaugucaccacugc

SEQ ID NO: 526329 - RNA, 32 nt, Human
uggguugccuggggugauccucccuccugcgu

SEQ ID NO: 526330 - RNA, 32 nt, Human
uggguugcuguuaacccagggccuagacuucu

SEQ ID NO: 526331 - RNA, 32 nt, Human
uggguuggaaaagagaagaugaagggacaucc

SEQ ID NO: 526332 - RNA, 32 nt, Human
uggguuggaauccagccccaccucuuuuaugc

SEQ ID NO: 526333 - RNA, 32 nt, Human
uggguuggaugucccucacugcagccuguccg

SEQ ID NO: 526334 - RNA, 32 nt, Human
uggguuggcugcaguagugagaggcugggggu

SEQ ID NO: 526335 - RNA, 32 nt, Human
uggguuggcuuccugcccccagcugcagcuau

SEQ ID NO: 526336 - RNA, 32 nt, Human
uggguugggaggauugcuuaaggccaggaguu

SEQ ID NO: 526337 - RNA, 32 nt, Human
uggguugggauuacaggcgugagccaccgcgu

SEQ ID NO: 526338 - RNA, 32 nt, Human
uggguugggcugcaggccuggccgugagcggg

SEQ ID NO: 526339 - RNA, 32 nt, Human
uggguugggcugcccaggcuggucagagcuca

SEQ ID NO: 526340 - RNA, 32 nt, Human
uggguugggcuggagagguauguguguguaaa

SEQ ID NO: 526341 - RNA, 32 nt, Human
uggguugguagaugcagcaaaccaccauggca

SEQ ID NO: 526342 - RNA, 32 nt, Human
uggguugguaggugcagcaaaccaccauggca

SEQ ID NO: 526343 - RNA, 32 nt, Human
uggguuggugguaacaguggaggcaggguagg

SEQ ID NO: 526344 - RNA, 32 nt, Human
uggguuguaaacaugugguaguaccagaguau

SEQ ID NO: 526345 - RNA, 20 nt, Human
uggguugugacuucuacuga

SEQ ID NO: 526346 - RNA, 32 nt, Human
uggguugugccuguaaucccagcuacuuggga

SEQ ID NO: 526347 - RNA, 32 nt, Human
uggguugugcugaaacagcucuucugagaacu

SEQ ID NO: 526348 - RNA, 32 nt, Human
uggguugugggaugagaugcagcaacccuauu

SEQ ID NO: 526349 - RNA, 32 nt, Human
uggguugugggcagaggagccauccuggcgga

SEQ ID NO: 526350 - RNA, 32 nt, Human
uggguuguggggucauguagggguggguugcc

SEQ ID NO: 526351 - RNA, 32 nt, Human
uggguuguugggccucucuggagcugagcaca

SEQ ID NO: 526352 - RNA, 24 nt, Human
uggguuuagaaagaucucaggaaa

SEQ ID NO: 526353 - RNA, 32 nt, Human
uggguuuauguuucaccucauuuggaacaaaa

SEQ ID NO: 526354 - RNA, 21 nt, Human
uggguuucaccauguuggcca

SEQ ID NO: 526355 - RNA, 32 nt, Human
uggguuucaugucaucuucugcuaacacaacu

SEQ ID NO: 526356 - RNA, 32 nt, Human
uggguuuccagaaaacaucuccaaagcuauac

SEQ ID NO: 526357 - RNA, 32 nt, Human
uggguuuccuggaaguggauuugggccaagaa

SEQ ID NO: 526358 - RNA, 21 nt, Human
uggguuucuagcaccuuaucu

SEQ ID NO: 526359 - RNA, 32 nt, Human
uggguuucucacaagcguccuuccucauagga

SEQ ID NO: 526360 - RNA, 23 nt, Human
uggguuucuguggcacucuuuua

SEQ ID NO: 526361 - RNA, 32 nt, Human
uggguuugaagggcggaucucagucccuggcu

SEQ ID NO: 526362 - RNA, 32 nt, Human
uggguuugagcaauccucccaccucagccucc

SEQ ID NO: 526363 - RNA, 32 nt, Human
uggguuugagcccugcuucugugcacagccac

SEQ ID NO: 526364 - RNA, 32 nt, Human
uggguuugagcugggcuuauccuccaacugug

SEQ ID NO: 526365 - RNA, 32 nt, Human
uggguuugccaucuuuuuguuuucuuugaaaa

SEQ ID NO: 526366 - RNA, 32 nt, Human
uggguuuggaagggggaugcacuguggaucug

SEQ ID NO: 526367 - RNA, 32 nt, Human
uggguuuggaaggugugcuugcugugguacug

SEQ ID NO: 526368 - RNA, 32 nt, Human
uggguuuggagaacacaguggcugguuuuaaa

SEQ ID NO: 526369 - RNA, 20 nt, Human
uggguuuggggccugggaca

SEQ ID NO: 526370 - RNA, 21 nt, Human
uggguuuggucuacccaccca

SEQ ID NO: 526371 - RNA, 32 nt, Human
uggguuugguuagaggaaggcugaacucuuca

SEQ ID NO: 526372 - RNA, 32 nt, Human
uggguuugucuugucuucuuuuuaauuuaugg

SEQ ID NO: 526373 - RNA, 32 nt, Human
uggguuuguguguguggaugugguuucugccu

SEQ ID NO: 526374 - RNA, 32 nt, Human
uggguuuuaccacugcacgaccaucuggcucu

SEQ ID NO: 526375 - RNA, 22 nt, Human
uggguuuucaauaaacuugcca

SEQ ID NO: 526376 - RNA, 32 nt, Human
uggguuuuccauccuccgaagacaucaccuuu

SEQ ID NO: 526377 - RNA, 32 nt, Human
uggguuuuccucuucccuaucuccccuccucc

SEQ ID NO: 526378 - RNA, 32 nt, Human
uggguuuugaguuagacaguccugggcuugag

SEQ ID NO: 526379 - RNA, 32 nt, Human
uggguuuugcucugcugaugauggucagggac

SEQ ID NO: 526380 - RNA, 32 nt, Human
uggguuuuguuuaggaggguggguggggaagg

SEQ ID NO: 526381 - RNA, 32 nt, Human
uggguuuuguuucuuuccuuccuuccuuccuu

SEQ ID NO: 526382 - RNA, 32 nt, Human
uggguuuuuaauccuggccuugcugcuagaaa

SEQ ID NO: 526383 - RNA, 21 nt, Human
ugguaaaaagaggcugagaca

SEQ ID NO: 526384 - RNA, 32 nt, Human
ugguaaaaaugucaguuugacacugccaagug

SEQ ID NO: 526385 - RNA, 32 nt, Human
ugguaaaacaagucugaaagcugcagugucau

SEQ ID NO: 526386 - RNA, 32 nt, Human
ugguaaaaccccaucucuaccaaaaauacaaa

SEQ ID NO: 526387 - RNA, 32 nt, Human
ugguaaaacuuacaauccucaaaacuucuuac

SEQ ID NO: 526388 - RNA, 32 nt, Human
ugguaaaagucaaacaguauaaaaggguauac

SEQ ID NO: 526389 - RNA, 32 nt, Human
ugguaaaauagugagaccucaucucuacaaag

SEQ ID NO: 526390 - RNA, 32 nt, Human
ugguaaacccagcugggagguuucuaggcagc

SEQ ID NO: 526391 - RNA, 32 nt, Human
ugguaaagacgggguuucgccuuguugcccag

SEQ ID NO: 526392 - RNA, 32 nt, Human
ugguaaagauggcauuucaccauguuguacag

SEQ ID NO: 526393 - RNA, 32 nt, Human
ugguaaaggggugcuggaggccauggaggagc

SEQ ID NO: 526394 - RNA, 32 nt, Human
ugguaaauagauaagaaaauugagacucauag

SEQ ID NO: 526395 - RNA, 32 nt, Human
ugguaaauaguugggaggcaaagggaagaaug

SEQ ID NO: 526396 - RNA, 22 nt, Human
ugguaaauauccagcgcuucac

SEQ ID NO: 526397 - RNA, 32 nt, Human
ugguaaauugcaauucuuucuggggauauauu

SEQ ID NO: 526398 - RNA, 32 nt, Human
ugguaacaagacuuagaaggagggcccaggca

SEQ ID NO: 526399 - RNA, 32 nt, Human
ugguaacacauauuuuguuugaggggccacug

SEQ ID NO: 526400 - RNA, 32 nt, Human
ugguaacaccacugcacuccaaccugggcaac

SEQ ID NO: 526401 - RNA, 32 nt, Human
ugguaacagacagaagaauggaagcauuccag

SEQ ID NO: 526402 - RNA, 32 nt, Human
ugguaacagauggguagaggcagcucagguga

SEQ ID NO: 526403 - RNA, 21 nt, Human
ugguaacaggcugggugcaau

SEQ ID NO: 526404 - RNA, 22 nt, Human
ugguaacaggcugggugcaaug

SEQ ID NO: 526405 - RNA, 32 nt, Human
ugguaacaggcugggugcaauggcucacaccu

SEQ ID NO: 526406 - RNA, 32 nt, Human
ugguaacaguaugauaaaauucaugcuguuau

SEQ ID NO: 526407 - RNA, 32 nt, Human
ugguaacaucucugacuucucuaccuccucug

SEQ ID NO: 526408 - RNA, 21 nt, Human
ugguaacaugcacauccuguu

SEQ ID NO: 526409 - RNA, 22 nt, Human
ugguaaccaggcugugcgccug

SEQ ID NO: 526410 - RNA, 32 nt, Human
ugguaaccugaaagauacgacauugcugagcc

SEQ ID NO: 526411 - RNA, 32 nt, Human
ugguaacucaagacugccugccuagguuucuu

SEQ ID NO: 526412 - RNA, 32 nt, Human
ugguaacucauuuugauuguuauaacaucuca

SEQ ID NO: 526413 - RNA, 32 nt, Human
ugguaacucucuuccuucuuuuucucccuacc

SEQ ID NO: 526414 - RNA, 32 nt, Human
ugguaacuucucugagcuucaguuuccaagug

SEQ ID NO: 526415 - RNA, 32 nt, Human
ugguaagaccucaaacugcaaaugacuauuca

SEQ ID NO: 526416 - RNA, 32 nt, Human
ugguaagacuucuggguucaugaaguuucggc

SEQ ID NO: 526417 - RNA, 26 nt, Human
ugguaagagcuguaguuagcaaaauu

SEQ ID NO: 526418 - RNA, 32 nt, Human
ugguaagaggaagggaaaugcagccucaguaa

SEQ ID NO: 526419 - RNA, 32 nt, Human
ugguaagauguguuuccgugcaugucagugcu

SEQ ID NO: 526420 - RNA, 32 nt, Human
ugguaagauguucagucaaaauucggcccuug

SEQ ID NO: 526421 - RNA, 32 nt, Human
ugguaagcagagcccagggccucuagggcagu

SEQ ID NO: 526422 - RNA, 32 nt, Human
ugguaagcauuuuuauaaacccacucauuuua

SEQ ID NO: 526423 - RNA, 32 nt, Human
ugguaaggucuggggugacacucuauauacua

SEQ ID NO: 526424 - RNA, 32 nt, Human
ugguaaguucuuccagcugaagccacuuuuuc

SEQ ID NO: 526425 - RNA, 32 nt, Human
ugguaauaagccucgcagcccagguccagagc

SEQ ID NO: 526426 - RNA, 32 nt, Human
ugguaauagcuucuauaaaaucugccauaguu

SEQ ID NO: 526427 - RNA, 32 nt, Human
ugguaauauuuggagcuuuauagccuguauuc

SEQ ID NO: 526428 - RNA, 21 nt, Human
ugguaaucauuuucuucaggg

SEQ ID NO: 526429 - RNA, 32 nt, Human
ugguaauccaacaaagaaacagauggugagaa

SEQ ID NO: 526430 - RNA, 32 nt, Human
ugguaaugcucacuccagguucugcaaaaguu

SEQ ID NO: 526431 - RNA, 30 nt, Human
ugguaaugggcccugccgccaggccucggc

SEQ ID NO: 526432 - RNA, 32 nt, Human
ugguaauuccauuauaaaaccuaaugaaacaa

SEQ ID NO: 526433 - RNA, 32 nt, Human
ugguaauuguagagaaucaggagaaguuacgu

SEQ ID NO: 526434 - RNA, 32 nt, Human
ugguaauuugauuccccuuugcagugauuggu

SEQ ID NO: 526435 - RNA, 32 nt, Human
ugguacaaaccagcccaagugcaaaggcccaa

SEQ ID NO: 526436 - RNA, 32 nt, Human
ugguacaaauagauggagaccugcugggauca

SEQ ID NO: 526437 - RNA, 32 nt, Human
ugguacaaaugacauuuguucuuucugugaaa

SEQ ID NO: 526438 - RNA, 32 nt, Human
ugguacaagauguggagguggaagacagugau

SEQ ID NO: 526439 - RNA, 32 nt, Human
ugguacaaucauggcucacugcagccuccacc

SEQ ID NO: 526440 - RNA, 23 nt, Human
ugguacaaucucggcucacugca

SEQ ID NO: 526441 - RNA, 23 nt, Human
ugguacaaucuggcucacugcag

SEQ ID NO: 526442 - RNA, 24 nt, Human
ugguacacaccuguaaucccagcu

SEQ ID NO: 526443 - RNA, 32 nt, Human
ugguacacaccuuuguccacuggguaaauuau

SEQ ID NO: 526444 - RNA, 32 nt, Human
ugguacaccuacaggcuggaguguaaaaugga

SEQ ID NO: 526445 - RNA, 24 nt, Human
ugguacacgccuguaaucccagcu

SEQ ID NO: 526446 - RNA, 32 nt, Human
ugguacacugaauucucuggguggcuuucuug

SEQ ID NO: 526447 - RNA, 32 nt, Human
ugguacagaaauacaucuuugcucugagaaua

SEQ ID NO: 526448 - RNA, 32 nt, Human
ugguacagacgggguuucaccauguuggccag

SEQ ID NO: 526449 - RNA, 32 nt, Human
ugguacagauguguaugggaaaccccaacccc

SEQ ID NO: 526450 - RNA, 32 nt, Human
ugguacagcccucccuguucuaccaccuuggu

SEQ ID NO: 526451 - RNA, 32 nt, Human
ugguacagcugcaggccguggucagggacggc

SEQ ID NO: 526452 - RNA, 32 nt, Human
ugguacaggagaaggugagauggagagaaagc

SEQ ID NO: 526453 - RNA, 32 nt, Human
ugguacagguuguugagaugaaggagagaugg

SEQ ID NO: 526454 - RNA, 32 nt, Human
ugguacaguggaagaacuggccagagagucug

SEQ ID NO: 526455 - RNA, 32 nt, Human
ugguacaugaacaguuggaacugcugacuuuc

SEQ ID NO: 526456 - RNA, 23 nt, Human
ugguacaugccuguaaucccagc

SEQ ID NO: 526457 - RNA, 24 nt, Human
ugguacaugccuguaaucccagcu

SEQ ID NO: 526458 - RNA, 32 nt, Human
ugguacaugccuguaaucccagcuacacugga

SEQ ID NO: 526459 - RNA, 32 nt, Human
ugguacaugccuguaaucccagcuacucagga

SEQ ID NO: 526460 - RNA, 32 nt, Human
ugguacaugccuguaaucccagcuacuuggga

SEQ ID NO: 526461 - RNA, 32 nt, Human
ugguacaugccuguagcccuagcuacucugga

SEQ ID NO: 526462 - RNA, 32 nt, Human
ugguacaugccuguagucccagauacucggga

SEQ ID NO: 526463 - RNA, 32 nt, Human
ugguaccaagcccacccuugggguuccugcuc

SEQ ID NO: 526464 - RNA, 32 nt, Human
ugguaccacaccagggccucagccuggccccu

SEQ ID NO: 526465 - RNA, 32 nt, Human
ugguaccacugcacuccagccugggugacaga

SEQ ID NO: 526466 - RNA, 32 nt, Human
ugguacccagaagaaggagcaugagugggcaa

SEQ ID NO: 526467 - RNA, 32 nt, Human
ugguacccagggugaguugguggagaacagag

SEQ ID NO: 526468 - RNA, 32 nt, Human
ugguacccaggugcccuucaggcucuaaccaa

SEQ ID NO: 526469 - RNA, 32 nt, Human
ugguacccccaucacccagggcguggagauga

SEQ ID NO: 526470 - RNA, 32 nt, Human
ugguaccccugcacuccagcccagguuacaga

SEQ ID NO: 526471 - RNA, 32 nt, Human
ugguaccucauuuuggggagaaccuuaaaccc

SEQ ID NO: 526472 - RNA, 32 nt, Human
ugguaccucugcacugcagccugggcaacaga

SEQ ID NO: 526473 - RNA, 32 nt, Human
ugguaccugcagcacguuuccaugccugggag

SEQ ID NO: 526474 - RNA, 32 nt, Human
ugguaccugcagcgugggggacgugcuucuac

SEQ ID NO: 526475 - RNA, 21 nt, Human
ugguaccuguguucgucaggg

SEQ ID NO: 526476 - RNA, 32 nt, Human
ugguaccuuauuugucuaguaucuuauuugug

SEQ ID NO: 526477 - RNA, 32 nt, Human
ugguaccuucaauguaugacuccugggagaau

SEQ ID NO: 526478 - RNA, 24 nt, Human
ugguaccuucccccagcuuuccau

SEQ ID NO: 526479 - RNA, 32 nt, Human
ugguaccuucuggaggaggacgguuuccugga

SEQ ID NO: 526480 - RNA, 32 nt, Human
ugguaccuuuacaucucccaacuuuccguucc

SEQ ID NO: 526481 - RNA, 32 nt, Human
ugguacgacuccuggccuuuuaucuaaaggac

SEQ ID NO: 526482 - RNA, 32 nt, Human
ugguacgaucacagcucacugcagccuccacc

SEQ ID NO: 526483 - RNA, 23 nt, Human
ugguacgaucuuggcucacugca

SEQ ID NO: 526484 - RNA, 32 nt, Human
ugguacgugccuguaggccuagcuacuuagga

SEQ ID NO: 526485 - RNA, 32 nt, Human
ugguacgugccuguagucccagcuacuucggg

SEQ ID NO: 526486 - RNA, 32 nt, Human
ugguacgugggugaggggauggaggaaggcga

SEQ ID NO: 526487 - RNA, 32 nt, Human
ugguacuagacauauaaucacagggagucauu

SEQ ID NO: 526488 - RNA, 32 nt, Human
ugguacucaaagcugcuuaggaaucaaaaugu

SEQ ID NO: 526489 - RNA, 23 nt, Human
ugguacucaccucagugcugcac

SEQ ID NO: 526490 - RNA, 31 nt, Human
ugguacucaguaaauauuuguugaaaugaau

SEQ ID NO: 526491 - RNA, 32 nt, Human
ugguacuccuaugcaauauuacucagcuuuuu

SEQ ID NO: 526492 - RNA, 32 nt, Human
ugguacucugggagauugugacccuggcagaa

SEQ ID NO: 526493 - RNA, 32 nt, Human
ugguacugcaguggcaacuacaaagguaucuu

SEQ ID NO: 526494 - RNA, 32 nt, Human
ugguacugggggagggagagaucugacaaaua

SEQ ID NO: 526495 - RNA, 32 nt, Human
ugguacuguacagcuggcucuacuuccccaug

SEQ ID NO: 526496 - RNA, 32 nt, Human
ugguacuuaaugaugugacucucugauccugu

SEQ ID NO: 526497 - RNA, 32 nt, Human
ugguacuuugguggccacauaagccauuauuc

SEQ ID NO: 526498 - RNA, 31 nt, Human
ugguacuuuguggaaagaggggagaauaaag

SEQ ID NO: 526499 - RNA, 24 nt, Human
ugguacuuuuccacaguguaccau

SEQ ID NO: 526500 - RNA, 32 nt, Human
ugguagaaaaaggggccugagugaaggauuau

SEQ ID NO: 526501 - RNA, 32 nt, Human
ugguagaaaacaauauaaaaaguguucaugug

SEQ ID NO: 526502 - RNA, 32 nt, Human
ugguagaaacggaaguagaaguaggcuggagg

SEQ ID NO: 526503 - RNA, 32 nt, Human
ugguagaaacuccucuuucuucauaguccuca

SEQ ID NO: 526504 - RNA, 32 nt, Human
ugguagaauuuguaugcucuuagagcccaaca

SEQ ID NO: 526505 - RNA, 32 nt, Human
ugguagagaaaggguuucaucauuguuggcug

SEQ ID NO: 526506 - RNA, 32 nt, Human
ugguagagacagaguuucaccagguuggucag

SEQ ID NO: 526507 - RNA, 32 nt, Human
ugguagagacaggguaucuccauguuggucag

SEQ ID NO: 526508 - RNA, 32 nt, Human
ugguagagacaggguuucaccauguuagccag

SEQ ID NO: 526509 - RNA, 32 nt, Human
ugguagagacaggguuucaccauguuggccag

SEQ ID NO: 526510 - RNA, 32 nt, Human
ugguagagacaggguuucaccauguuggucag

SEQ ID NO: 526511 - RNA, 32 nt, Human
ugguagagacaggguuucgccauguugcccag

SEQ ID NO: 526512 - RNA, 32 nt, Human
ugguagagacgggauucuaccauguugcccag

SEQ ID NO: 526513 - RNA, 32 nt, Human
ugguagagacgggguuucaacauguugaccag

SEQ ID NO: 526514 - RNA, 32 nt, Human
ugguagagacgggguuucaccaguguuggcca

SEQ ID NO: 526515 - RNA, 32 nt, Human
ugguagagacgggguuucaccguguuggccag

SEQ ID NO: 526516 - RNA, 32 nt, Human
ugguagagacgggguuucacuguguuagccag

SEQ ID NO: 526517 - RNA, 32 nt, Human
ugguagagacgggguuucacuguguuggccag

SEQ ID NO: 526518 - RNA, 32 nt, Human
ugguagagacgggguuucaucauguuggccag

SEQ ID NO: 526519 - RNA, 32 nt, Human
ugguagagacgggguuuccccacguugaccag

SEQ ID NO: 526520 - RNA, 32 nt, Human
ugguagagauaggguuucacauguuggccaag

SEQ ID NO: 526521 - RNA, 32 nt, Human
ugguagagauggaguuucaccaugguggucag

SEQ ID NO: 526522 - RNA, 32 nt, Human
ugguagagauggggucucacuauguugcccag

SEQ ID NO: 526523 - RNA, 32 nt, Human
ugguagagaugggguuucaccaaguuggcuag

SEQ ID NO: 526524 - RNA, 32 nt, Human
ugguagagaugggguuucaccaugcuggccag

SEQ ID NO: 526525 - RNA, 32 nt, Human
ugguagagaugggguuucaccauguuggacag

SEQ ID NO: 526526 - RNA, 32 nt, Human
ugguagagaugggguuucaccauguuggccag

SEQ ID NO: 526527 - RNA, 32 nt, Human
ugguagagaugggguuucaccauguuggcuag

SEQ ID NO: 526528 - RNA, 32 nt, Human
ugguagagaugggguuucacuguuuuggccag

SEQ ID NO: 526529 - RNA, 32 nt, Human
ugguagagaugggguuucgccauguugcccag

SEQ ID NO: 526530 - RNA, 21 nt, Human
ugguagaggaggccccuccug

SEQ ID NO: 526531 - RNA, 32 nt, Human
ugguagaggcgggguuucgucauguuggccag

SEQ ID NO: 526532 - RNA, 20 nt, Human
ugguagagggucccgggaag

SEQ ID NO: 526533 - RNA, 32 nt, Human
ugguagauaagaaugagucagcagugauuguu

SEQ ID NO: 526534 - RNA, 32 nt, Human
ugguagauauugaauggcuuggaaaagaggua

SEQ ID NO: 526535 - RNA, 32 nt, Human
ugguagauccacccuuaugcuucucaguuuag

SEQ ID NO: 526536 - RNA, 32 nt, Human
ugguagaugccuguaauuccagcuacucagga

SEQ ID NO: 526537 - RNA, 32 nt, Human
ugguagaugcgaaauuuaucugugcaugaaag

SEQ ID NO: 526538 - RNA, 22 nt, Human
ugguagauguuugauugacuua

SEQ ID NO: 526539 - RNA, 21 nt, Human
ugguagauugcuguugaucuu

SEQ ID NO: 526540 - RNA, 32 nt, Human
ugguagauuuugccaggcuucucccaacagag

SEQ ID NO: 526541 - RNA, 32 nt, Human
ugguagcaaauguauauguaugaguuuguauu

SEQ ID NO: 526542 - RNA, 32 nt, Human
ugguagcaaucagggaagcuggccuacaugcu

SEQ ID NO: 526543 - RNA, 32 nt, Human
ugguagcaccacugcacuucagccuggacaac

SEQ ID NO: 526544 - RNA, 32 nt, Human
ugguagcagaagcagcagugaagaugaugugg

SEQ ID NO: 526545 - RNA, 18 nt, Human
ugguagcagaugguccca

SEQ ID NO: 526546 - RNA, 32 nt, Human
ugguagcaguagauuccaggaggagaagggua

SEQ ID NO: 526547 - RNA, 32 nt, Human
ugguagccacccugguucuuguugacuugagg

SEQ ID NO: 526548 - RNA, 32 nt, Human
ugguagcccugggguagccuguaguagacucg

SEQ ID NO: 526549 - RNA, 23 nt, Human
ugguagccgaguggcacgcgggg

SEQ ID NO: 526550 - RNA, 32 nt, Human
ugguagccuagaguccuggggagcuucugucc

SEQ ID NO: 526551 - RNA, 32 nt, Human
ugguagccucagaagcagagcuguuuggcaga

SEQ ID NO: 526552 - RNA, 32 nt, Human
ugguagccuugccuuuuacccagcacagacga

SEQ ID NO: 526553 - RNA, 32 nt, Human
ugguagcgcacaccuguagucacagcuacucc

SEQ ID NO: 526554 - RNA, 32 nt, Human
ugguagcuauuccacccucugccugccugccu

SEQ ID NO: 526555 - RNA, 21 nt, Human
ugguagcucaugccuguaauc

SEQ ID NO: 526556 - RNA, 32 nt, Human
ugguagcucaugccuguaucccagcccuuugg

SEQ ID NO: 526557 - RNA, 32 nt, Human
ugguagcuccaccccaacucccuucugcuggg

SEQ ID NO: 526558 - RNA, 32 nt, Human
ugguagcucuaagaaaauaucuugcaagcucc

SEQ ID NO: 526559 - RNA, 32 nt, Human
ugguagcugagacugcaugcccagcuccaaau

SEQ ID NO: 526560 - RNA, 32 nt, Human
ugguagcuguagucuuagcuacucaggaggcu

SEQ ID NO: 526561 - RNA, 32 nt, Human
ugguagcuucuuuccucuucguccugaugcug

SEQ ID NO: 526562 - RNA, 32 nt, Human
ugguaggagcaucuguaagugcauuuaaauca

SEQ ID NO: 526563 - RNA, 32 nt, Human
ugguaggaucacugggacuccaagccucagca

SEQ ID NO: 526564 - RNA, 32 nt, Human
ugguaggcagcaaaagaccaaaucucaguugu

SEQ ID NO: 526565 - RNA, 32 nt, Human
ugguaggcaggagccccgcccucccaggcaca

SEQ ID NO: 526566 - RNA, 32 nt, Human
ugguaggcauuuccuaucaccuauuuccauuc

SEQ ID NO: 526567 - RNA, 32 nt, Human
ugguaggcgccuguaaucucagcuacuugaaa

SEQ ID NO: 526568 - RNA, 21 nt, Human
ugguaggcgucugcauucccu

SEQ ID NO: 526569 - RNA, 32 nt, Human
ugguaggcugggaacugaagagacuuguggua

SEQ ID NO: 526570 - RNA, 32 nt, Human
ugguagggaagugggaugcuccucagauauua

SEQ ID NO: 526571 - RNA, 32 nt, Human
ugguagggacagaguuucaccauguuggccag

SEQ ID NO: 526572 - RNA, 32 nt, Human
ugguagggagggagguauaguugggggacagg

SEQ ID NO: 526573 - RNA, 32 nt, Human
ugguagggcaugugccuguuucccucucagcc

SEQ ID NO: 526574 - RNA, 32 nt, Human
ugguagggggagaaggaggagcuggaggaggg

SEQ ID NO: 526575 - RNA, 32 nt, Human
ugguagggggcagagaaggaaaagcugagggg

SEQ ID NO: 526576 - RNA, 32 nt, Human
ugguagggguuguuugguuuugguuuucacug

SEQ ID NO: 526577 - RNA, 32 nt, Human
ugguaggguggaggggagagaagaagaugcug

SEQ ID NO: 526578 - RNA, 32 nt, Human
ugguagguaaugcaguuugaaaccauuucacu

SEQ ID NO: 526579 - RNA, 25 nt, Human
ugguagguccuagacgugguucccu

SEQ ID NO: 526580 - RNA, 32 nt, Human
ugguaggucuucucaccucgauggugcauaac

SEQ ID NO: 526581 - RNA, 32 nt, Human
ugguaggugaucucaggaauugcaggggaaag

SEQ ID NO: 526582 - RNA, 32 nt, Human
ugguaggugccuguaaucccagcuacuuggga

SEQ ID NO: 526583 - RNA, 32 nt, Human
ugguagguuguccugaauucuacauuauuaga

SEQ ID NO: 526584 - RNA, 32 nt, Human
ugguagguuguugcugucuguguuguugcugu

SEQ ID NO: 526585 - RNA, 32 nt, Human
ugguagguuucaucaggugguuaaagucguca

SEQ ID NO: 526586 - RNA, 32 nt, Human
ugguaguaaaacacagagggccaguaacgggu

SEQ ID NO: 526587 - RNA, 32 nt, Human
ugguaguaauuuccuguuuuccuugccuuuuu

SEQ ID NO: 526588 - RNA, 32 nt, Human
ugguaguacaauauuuuguuaggcguuucuga

SEQ ID NO: 526589 - RNA, 32 nt, Human
ugguaguacuccugcaaaauuuuauagcucag

SEQ ID NO: 526590 - RNA, 32 nt, Human
ugguaguaucuauuagagaugggggagggguu

SEQ ID NO: 526591 - RNA, 32 nt, Human
ugguagucacauagcagaaugaucagaguuac

SEQ ID NO: 526592 - RNA, 20 nt, Human
ugguagucagauauucaggg

SEQ ID NO: 526593 - RNA, 32 nt, Human
ugguaguccuuuucccuuucuccagucggccc

SEQ ID NO: 526594 - RNA, 18 nt, Human
ugguagucgcuggcccca

SEQ ID NO: 526595 - RNA, 32 nt, Human
ugguagucugcagggcugccucagguuuccua

SEQ ID NO: 526596 - RNA, 32 nt, Human
ugguagugaacagcagaucggucagcaccaga

SEQ ID NO: 526597 - RNA, 32 nt, Human
ugguagugacagaucugcaggacagauuuauc

SEQ ID NO: 526598 - RNA, 32 nt, Human
ugguagugcaacaguaacccaaaaaugucaau

SEQ ID NO: 526599 - RNA, 21 nt, Human
ugguagugcagaaagaaucca

SEQ ID NO: 526600 - RNA, 19 nt, Human
ugguagugccagggaccca

SEQ ID NO: 526601 - RNA, 31 nt, Human
ugguagugccucucugggcccugguuuaaaa

SEQ ID NO: 526602 - RNA, 21 nt, Human
ugguagugcugggcuguuccc

SEQ ID NO: 526603 - RNA, 20 nt, Human
ugguagugcugguggguuuu

SEQ ID NO: 526604 - RNA, 32 nt, Human
ugguagugguggcaguggugauggugguguug

SEQ ID NO: 526605 - RNA, 17 nt, Human
ugguagugguggguccc

SEQ ID NO: 526606 - RNA, 19 nt, Human
ugguaguguuggcgcuccu

SEQ ID NO: 526607 - RNA, 32 nt, Human
ugguaguuguggguugaagcacuggacaaugc

SEQ ID NO: 526608 - RNA, 32 nt, Human
ugguauaacucucagucagaggccaacggccu

SEQ ID NO: 526609 - RNA, 32 nt, Human
ugguauaaucaugccucacugcagccucggcu

SEQ ID NO: 526610 - RNA, 30 nt, Human
ugguauaguacuugacagaguaaauacuuc

SEQ ID NO: 526611 - RNA, 32 nt, Human
ugguauaguacuugacagaguaaauacuucau

SEQ ID NO: 526612 - RNA, 32 nt, Human
ugguauaugccugggagcagauuugcuggauc

SEQ ID NO: 526613 - RNA, 32 nt, Human
ugguauaugccuguagucccagcuacucagga

SEQ ID NO: 526614 - RNA, 32 nt, Human
ugguauaugcugggaacagggugcaggggcca

SEQ ID NO: 526615 - RNA, 32 nt, Human
ugguauauuaaaaggcacaagggcauuguggc

SEQ ID NO: 526616 - RNA, 18 nt, Human
ugguaucaccucaucuca

SEQ ID NO: 526617 - RNA, 32 nt, Human
ugguaucauugucuuuccugaaugacuuucua

SEQ ID NO: 526618 - RNA, 32 nt, Human
ugguauccuaucuuccuuuuguggacuucugc

SEQ ID NO: 526619 - RNA, 32 nt, Human
ugguauccuucuuggccaacagaugguaucuu

SEQ ID NO: 526620 - RNA, 32 nt, Human
ugguaucuaacuuugguucugaaguuuaugga

SEQ ID NO: 526621 - RNA, 32 nt, Human
ugguaucuacugcuccuuuuuacugccuucag

SEQ ID NO: 526622 - RNA, 32 nt, Human
ugguaucucaaggagguuucugagauagguag

SEQ ID NO: 526623 - RNA, 32 nt, Human
ugguaucucuagccuagaaucucguguguuag

SEQ ID NO: 526624 - RNA, 24 nt, Human
ugguaucucuucuuaguguucuau

SEQ ID NO: 526625 - RNA, 32 nt, Human
ugguaucugggcagaaguagcacagcucuugc

SEQ ID NO: 526626 - RNA, 22 nt, Human
ugguaucuucagcaguguuccg

SEQ ID NO: 526627 - RNA, 32 nt, Human
ugguaucuugcaggaacugugugcuaaaauug

SEQ ID NO: 526628 - RNA, 26 nt, Human
ugguaucuuuucaacuauuguuuuau

SEQ ID NO: 526629 - RNA, 32 nt, Human
ugguaugaaaauguguacauucccugugcaac

SEQ ID NO: 526630 - RNA, 32 nt, Human
ugguaugaagagaacguccacuuuaaggcuuu

SEQ ID NO: 526631 - RNA, 32 nt, Human
ugguaugaauccaggagguggagcuugcagug

SEQ ID NO: 526632 - RNA, 32 nt, Human
ugguaugagccgugcugcugggcacagccagg

SEQ ID NO: 526633 - RNA, 32 nt, Human
ugguaugaucacagcucacugcagcuuugauc

SEQ ID NO: 526634 - RNA, 32 nt, Human
ugguaugaucacggcucacugcagccucaacc

SEQ ID NO: 526635 - RNA, 32 nt, Human
ugguaugaucauagcugacugcagccucaacc

SEQ ID NO: 526636 - RNA, 32 nt, Human
ugguaugaucauggcuugcugcagccucaacc

SEQ ID NO: 526637 - RNA, 32 nt, Human
ugguaugaucucagcucacugcagccucugcc

SEQ ID NO: 526638 - RNA, 32 nt, Human
ugguaugaucuuggcucacugcagccucugcc

SEQ ID NO: 526639 - RNA, 32 nt, Human
ugguaugaugggaacugcccuuuucaccugcc

SEQ ID NO: 526640 - RNA, 21 nt, Human
ugguaugcaccuguaauccca

SEQ ID NO: 526641 - RNA, 32 nt, Human
ugguaugcaccuguaaucccagcuacucggga

SEQ ID NO: 526642 - RNA, 21 nt, Human
ugguaugccccuguaguccca

SEQ ID NO: 526643 - RNA, 32 nt, Human
ugguauggaagguggagcguucaccagugacc

SEQ ID NO: 526644 - RNA, 32 nt, Human
ugguauggcucugaggcucccuggggccugcu

SEQ ID NO: 526645 - RNA, 32 nt, Human
ugguauggucagaauauaauacuuccauaauu

SEQ ID NO: 526646 - RNA, 32 nt, Human
ugguaugguggucaccuuugcuccagucaacg

SEQ ID NO: 526647 - RNA, 21 nt, Human
ugguaugugccuguaauccca

SEQ ID NO: 526648 - RNA, 32 nt, Human
ugguaugugccuguaaucccagcuacuuggga

SEQ ID NO: 526649 - RNA, 21 nt, Human
ugguaugugccuguaguccca

SEQ ID NO: 526650 - RNA, 32 nt, Human
ugguaugugcuagaacaaugggaggcugugau

SEQ ID NO: 526651 - RNA, 32 nt, Human
ugguaugugggaagaaguucagaggaaccguu

SEQ ID NO: 526652 - RNA, 19 nt, Human
ugguaugugggugguccca

SEQ ID NO: 526653 - RNA, 32 nt, Human
ugguaugugguguaauguugauugggaauaag

SEQ ID NO: 526654 - RNA, 32 nt, Human
ugguauuaggagguggggccuuugggauguga

SEQ ID NO: 526655 - RNA, 32 nt, Human
ugguauucuccucuuuaccugguagggaucuu

SEQ ID NO: 526656 - RNA, 19 nt, Human
ugguauugaucuuuucaca

SEQ ID NO: 526657 - RNA, 32 nt, Human
ugguauuguaacauuuaugcucuaauaucaac

SEQ ID NO: 526658 - RNA, 32 nt, Human
ugguauuguugucacuaagccagaccugauca

SEQ ID NO: 526659 - RNA, 32 nt, Human
ugguauuuacugcaaugucugucccuaaacau

SEQ ID NO: 526660 - RNA, 32 nt, Human
ugguauuuacuuuuguuccugcguuacuuugc

SEQ ID NO: 526661 - RNA, 32 nt, Human
ugguauuugccugggccaggaaaggauaagaa

SEQ ID NO: 526662 - RNA, 24 nt, Human
ugguauuuuuuauuaagccuccau

SEQ ID NO: 526663 - RNA, 32 nt, Human
uggucaaaaagcuccuuggggcaugaaggccg

SEQ ID NO: 526664 - RNA, 32 nt, Human
uggucaaacacuagucuggacauggugguaaa

SEQ ID NO: 526665 - RNA, 32 nt, Human
uggucaaacccagcaacccuuggccagaacuu

SEQ ID NO: 526666 - RNA, 32 nt, Human
uggucaaagcccccaguauagcccauuccugu

SEQ ID NO: 526667 - RNA, 32 nt, Human
uggucaaauuggaagcccagggccaggacccg

SEQ ID NO: 526668 - RNA, 32 nt, Human
uggucaacauagugaaaccccgucucuaauaa

SEQ ID NO: 526669 - RNA, 32 nt, Human
uggucaacauggcaaaacccugucucuacaaa

SEQ ID NO: 526670 - RNA, 32 nt, Human
uggucaacauggcaaaagcccaucucuacuaa

SEQ ID NO: 526671 - RNA, 32 nt, Human
uggucaacauggcgaaaccccaucucuacuaa

SEQ ID NO: 526672 - RNA, 32 nt, Human
uggucaacauggcgaaaccccaucucuacuga

SEQ ID NO: 526673 - RNA, 32 nt, Human
uggucaacauggcgaaacccugucucuacaaa

SEQ ID NO: 526674 - RNA, 32 nt, Human
uggucaacauggcgaaacccugucucuacuaa

SEQ ID NO: 526675 - RNA, 32 nt, Human
uggucaacauggcgaaaucccgucucuacuaa

SEQ ID NO: 526676 - RNA, 32 nt, Human
uggucaacauggugaaaccccaucuccacuaa

SEQ ID NO: 526677 - RNA, 32 nt, Human
uggucaacauggugaaaccccaucucuacuaa

SEQ ID NO: 526678 - RNA, 32 nt, Human
uggucaacauggugaaaccccgucuccacuaa

SEQ ID NO: 526679 - RNA, 32 nt, Human
uggucaacauggugaaaccccgucucuacuaa

SEQ ID NO: 526680 - RNA, 32 nt, Human
uggucaacaugguguaaccccaucucuacuaa

SEQ ID NO: 526681 - RNA, 32 nt, Human
uggucaacccaggagcaguguccuacaccgcc

SEQ ID NO: 526682 - RNA, 32 nt, Human
uggucaaccucuagugagagcucucuuccugg

SEQ ID NO: 526683 - RNA, 32 nt, Human
uggucaacgggagggaggaggagcagacggca

SEQ ID NO: 526684 - RNA, 32 nt, Human
uggucaacucacaccugccucuucugcagccu

SEQ ID NO: 526685 - RNA, 32 nt, Human
uggucaacuggguucacucaucaacucauucc

SEQ ID NO: 526686 - RNA, 32 nt, Human
uggucaacuugguaaaaccccgucucuacuaa

SEQ ID NO: 526687 - RNA, 32 nt, Human
uggucaagauggugaaaccccaucucuacuaa

SEQ ID NO: 526688 - RNA, 32 nt, Human
uggucaaggagagggagagagagguaaggguc

SEQ ID NO: 526689 - RNA, 32 nt, Human
uggucaaguggaggggacgggaaaaagcuaug

SEQ ID NO: 526690 - RNA, 32 nt, Human
uggucaaguucaguuuuagaaaagggagucug

SEQ ID NO: 526691 - RNA, 32 nt, Human
uggucaauauggugaaaccccaucucuacuaa

SEQ ID NO: 526692 - RNA, 32 nt, Human
uggucacaaaccugcauggggacauggacaag

SEQ ID NO: 526693 - RNA, 32 nt, Human
uggucacaaguacauuaaggcacguagaaggu

SEQ ID NO: 526694 - RNA, 32 nt, Human
uggucacaaguuaucccuccucaguaugaaaa

SEQ ID NO: 526695 - RNA, 32 nt, Human
uggucacacaucuguaagugggagaggcagga

SEQ ID NO: 526696 - RNA, 32 nt, Human
uggucacaccacugcacuccagccugggcaau

SEQ ID NO: 526697 - RNA, 32 nt, Human
uggucacaccacuguauuccagccugggugac

SEQ ID NO: 526698 - RNA, 32 nt, Human
uggucacagcuacucagaaggcugagguggga

SEQ ID NO: 526699 - RNA, 32 nt, Human
uggucacaggccuggcaucccugcugcuccuc

SEQ ID NO: 526700 - RNA, 32 nt, Human
uggucacagggagggcucagaggagccugacu

SEQ ID NO: 526701 - RNA, 32 nt, Human
uggucacagucaacuauccuccgaccaucacg

SEQ ID NO: 526702 - RNA, 32 nt, Human
uggucacaucacagcagucucagcgaucgaua

SEQ ID NO: 526703 - RNA, 32 nt, Human
uggucacaugagucugucuccuuacuuuaguc

SEQ ID NO: 526704 - RNA, 32 nt, Human
uggucaccagaggcacagaagccagaugcgug

SEQ ID NO: 526705 - RNA, 32 nt, Human
uggucaccagcuccucccuuguucucuaaguu

SEQ ID NO: 526706 - RNA, 32 nt, Human
uggucaccccucucuccuccuggggcuggggc

SEQ ID NO: 526707 - RNA, 32 nt, Human
uggucacccugagagucccaucgccugcagca

SEQ ID NO: 526708 - RNA, 32 nt, Human
uggucacccuggacaaggagguaaccacccca

SEQ ID NO: 526709 - RNA, 32 nt, Human
uggucaccuccugccuggaaucuugccaucag

SEQ ID NO: 526710 - RNA, 32 nt, Human
uggucacggugcugaggaaccuccucaucagc

SEQ ID NO: 526711 - RNA, 32 nt, Human
uggucacucccuggcccugaccugagcccggg

SEQ ID NO: 526712 - RNA, 32 nt, Human
uggucacugaaugcacucccugguuuuuauuu

SEQ ID NO: 526713 - RNA, 32 nt, Human
uggucacugagugcucuaauaguaaggagaaa

SEQ ID NO: 526714 - RNA, 18 nt, Human
uggucacugaugauucca

SEQ ID NO: 526715 - RNA, 32 nt, Human
uggucacugcaaccuccaucucccuggcucaa

SEQ ID NO: 526716 - RNA, 32 nt, Human
uggucacugcaaccucugccuccuggguucaa

SEQ ID NO: 526717 - RNA, 32 nt, Human
uggucacugcacuccagccuggcuacagagug

SEQ ID NO: 526718 - RNA, 32 nt, Human
uggucacugcuggcccuagcauuggacccuag

SEQ ID NO: 526719 - RNA, 32 nt, Human
uggucacuggaacaucauaagggaaaacuuua

SEQ ID NO: 526720 - RNA, 32 nt, Human
uggucacuucaaacaugcccucaggcuugggg

SEQ ID NO: 526721 - RNA, 32 nt, Human
uggucacuuugauuuuucaaaggugacaauug

SEQ ID NO: 526722 - RNA, 32 nt, Human
uggucagaaauggauggauucuggaaauauuu

SEQ ID NO: 526723 - RNA, 20 nt, Human
uggucagaagucccagugag

SEQ ID NO: 526724 - RNA, 32 nt, Human
uggucagaagugacauaugccaacacgggguc

SEQ ID NO: 526725 - RNA, 32 nt, Human
uggucagaauuuucucacccuaguacuccuac

SEQ ID NO: 526726 - RNA, 32 nt, Human
uggucagacucugggacuccugagaugggaga

SEQ ID NO: 526727 - RNA, 32 nt, Human
uggucagaggccggggcuagaggcagauggaa

SEQ ID NO: 526728 - RNA, 30 nt, Human
uggucagauuuguuguaagaaagacugugc

SEQ ID NO: 526729 - RNA, 32 nt, Human
uggucagcagcccagaccccaucaggggagag

SEQ ID NO: 526730 - RNA, 32 nt, Human
uggucagcagugaccccagcagagcaggcccc

SEQ ID NO: 526731 - RNA, 32 nt, Human
uggucagcaguggccacaaggcugcuuucugc

SEQ ID NO: 526732 - RNA, 32 nt, Human
uggucagcaguucuaagagacacugcccacau

SEQ ID NO: 526733 - RNA, 32 nt, Human
uggucagcaucaggguccccagccucugggcu

SEQ ID NO: 526734 - RNA, 32 nt, Human
uggucagcauggcaaaaccccgucucuacuaa

SEQ ID NO: 526735 - RNA, 32 nt, Human
uggucagccagccaggcuagucccacauaccu

SEQ ID NO: 526736 - RNA, 32 nt, Human
uggucagccccacuccagcacggggugaacgg

SEQ ID NO: 526737 - RNA, 32 nt, Human
uggucagccccuccugggagggcacagccgua

SEQ ID NO: 526738 - RNA, 32 nt, Human
uggucagcccugcuuucugcagcuggaagccu

SEQ ID NO: 526739 - RNA, 18 nt, Human
uggucagccuaggugaga

SEQ ID NO: 526740 - RNA, 32 nt, Human
uggucagcuaauugcuuugacaacagcgcagu

SEQ ID NO: 526741 - RNA, 32 nt, Human
uggucagcuacacaaccuggaucuuaccacag

SEQ ID NO: 526742 - RNA, 21 nt, Human
uggucagcucaggcccuccua

SEQ ID NO: 526743 - RNA, 32 nt, Human
uggucagcuguggugggcugcuccccggagcu

SEQ ID NO: 526744 - RNA, 32 nt, Human
uggucaggacagagacaaaaaugaggaaaacu

SEQ ID NO: 526745 - RNA, 32 nt, Human
uggucaggacaguggggguuggggguggggug

SEQ ID NO: 526746 - RNA, 32 nt, Human
uggucaggagggucgcugcuguggaagggguc

SEQ ID NO: 526747 - RNA, 32 nt, Human
uggucaggcccagcacauccagccuggcaucc

SEQ ID NO: 526748 - RNA, 32 nt, Human
uggucaggcccagccaauggaacggaauggaa

SEQ ID NO: 526749 - RNA, 32 nt, Human
uggucaggcccaggcugagugagaugagcugc

SEQ ID NO: 526750 - RNA, 32 nt, Human
uggucaggcuccugcaggauaaguggccacca

SEQ ID NO: 526751 - RNA, 32 nt, Human
uggucaggcuggucucaaaccccugaccucag

SEQ ID NO: 526752 - RNA, 32 nt, Human
uggucagggauugggcugcuucuucaguuccu

SEQ ID NO: 526753 - RNA, 32 nt, Human
uggucagggcucaggcuucacuuuguaaacca

SEQ ID NO: 526754 - RNA, 32 nt, Human
uggucagggcuggucuugaacuccugagcuca

SEQ ID NO: 526755 - RNA, 32 nt, Human
uggucagggggcccugaaaacacugguaauau

SEQ ID NO: 526756 - RNA, 32 nt, Human
uggucagggugaggauggugagggagggcugg

SEQ ID NO: 526757 - RNA, 32 nt, Human
uggucaggucccauguugucccugcugccucc

SEQ ID NO: 526758 - RNA, 32 nt, Human
uggucaggugccucaguaaaucacagacccag

SEQ ID NO: 526759 - RNA, 32 nt, Human
uggucaguauucuuuuggaauguaaaccgauu

SEQ ID NO: 526760 - RNA, 32 nt, Human
uggucagucacgcaguugaggucagggaagga

SEQ ID NO: 526761 - RNA, 32 nt, Human
uggucaguccuccugaacauucaggaaaucaa

SEQ ID NO: 526762 - RNA, 32 nt, Human
uggucagucugaaagggaggcucucuuaagag

SEQ ID NO: 526763 - RNA, 32 nt, Human
uggucagugggacauuuugucaacuaugggua

SEQ ID NO: 526764 - RNA, 32 nt, Human
uggucagugggggucagccaggagcccaggga

SEQ ID NO: 526765 - RNA, 32 nt, Human
uggucaguuagacauacguugguuuccaggau

SEQ ID NO: 526766 - RNA, 32 nt, Human
uggucaguucucucaacuuugcuuugggcaag

SEQ ID NO: 526767 - RNA, 32 nt, Human
uggucauaccaccgcacuccagccugagcaac

SEQ ID NO: 526768 - RNA, 32 nt, Human
uggucauacgggucaguagggauaagaauugu

SEQ ID NO: 526769 - RNA, 32 nt, Human
uggucauagagagagaaggaccuuugacuuuu

SEQ ID NO: 526770 - RNA, 32 nt, Human
uggucauagcaucuaucuccuuugccuuaauu

SEQ ID NO: 526771 - RNA, 28 nt, Human
uggucaucaggagcugccucuucuguua

SEQ ID NO: 526772 - RNA, 32 nt, Human
uggucaucaguaucauuagugaaaaagaaaca

SEQ ID NO: 526773 - RNA, 32 nt, Human
uggucaugacacugcccuccagccuggacaac

SEQ ID NO: 526774 - RNA, 32 nt, Human
uggucaugagagcugggguggggaaggauugu

SEQ ID NO: 526775 - RNA, 32 nt, Human
uggucaugccacugcacuccagccugggcaac

SEQ ID NO: 526776 - RNA, 20 nt, Human
uggucaugccuguaauccca

SEQ ID NO: 526777 - RNA, 32 nt, Human
uggucaugccuguaaucccagcauuuuggaag

SEQ ID NO: 526778 - RNA, 32 nt, Human
uggucaugcuccagugugacucugguacccuu

SEQ ID NO: 526779 - RNA, 21 nt, Human
uggucaugcucucagcuccac

SEQ ID NO: 526780 - RNA, 32 nt, Human
uggucaugcuucugaagcugcucaccuggccg

SEQ ID NO: 526781 - RNA, 32 nt, Human
uggucaugcuuuggagaucaaauauugguuga

SEQ ID NO: 526782 - RNA, 32 nt, Human
uggucauggcaucaaggcucacugcagccugg

SEQ ID NO: 526783 - RNA, 24 nt, Human
uggucaugguggcucacgccugua

SEQ ID NO: 526784 - RNA, 21 nt, Human
uggucaugguggcucaugccu

SEQ ID NO: 526785 - RNA, 19 nt, Human
uggucaugguggugugcgc

SEQ ID NO: 526786 - RNA, 19 nt, Human
uggucauggugguguucac

SEQ ID NO: 526787 - RNA, 32 nt, Human
uggucauguggacauuuccagaaaagcauuau

SEQ ID NO: 526788 - RNA, 32 nt, Human
uggucauguuggucuuuguaacaaaucaaaau

SEQ ID NO: 526789 - RNA, 32 nt, Human
uggucauucaguuuaaaugaauggguauacug

SEQ ID NO: 526790 - RNA, 32 nt, Human
uggucauugccuugccaaacaggagcuccagc

SEQ ID NO: 526791 - RNA, 32 nt, Human
uggucauuggauuuaaaggccaccuggguaau

SEQ ID NO: 526792 - RNA, 32 nt, Human
uggucauugguguuugcucuugccucuccucc

SEQ ID NO: 526793 - RNA, 32 nt, Human
uggucauuuuucuucuuguggccucuggaaug

SEQ ID NO: 526794 - RNA, 32 nt, Human
ugguccaacagguguccugggucuggggccac

SEQ ID NO: 526795 - RNA, 32 nt, Human
ugguccaaguaguggaggagguuuuguagauu

SEQ ID NO: 526796 - RNA, 32 nt, Human
ugguccacagcacuccauucuggguggcagag

SEQ ID NO: 526797 - RNA, 32 nt, Human
ugguccacagggcaccugccacccugggccug

SEQ ID NO: 526798 - RNA, 32 nt, Human
ugguccaccaaccagacccuuggaaaggaaua

SEQ ID NO: 526799 - RNA, 32 nt, Human
ugguccaccuggcagauucugaccucaccugg

SEQ ID NO: 526800 - RNA, 32 nt, Human
ugguccacggccguacaauccccagcccuucc

SEQ ID NO: 526801 - RNA, 32 nt, Human
ugguccacucugcucugagcagccugggaugc

SEQ ID NO: 526802 - RNA, 32 nt, Human
ugguccacugccuuuucauauguguuguuucu

SEQ ID NO: 526803 - RNA, 32 nt, Human
ugguccagaaacuccuguuucuccuuaguugg

SEQ ID NO: 526804 - RNA, 32 nt, Human
ugguccagacuugccacauacuagguuaaaga

SEQ ID NO: 526805 - RNA, 32 nt, Human
ugguccagaggagggaggaggaagggaagacc

SEQ ID NO: 526806 - RNA, 32 nt, Human
ugguccagauagacucuuuuuaaggaucuugg

SEQ ID NO: 526807 - RNA, 32 nt, Human
ugguccagcuucuguggaaaagaaggauugcc

SEQ ID NO: 526808 - RNA, 22 nt, Human
ugguccaggagauaccagcaga

SEQ ID NO: 526809 - RNA, 32 nt, Human
ugguccaggcaggcggggaugugcggugacca

SEQ ID NO: 526810 - RNA, 32 nt, Human
ugguccaggggguguggcucaguggcuggugg

SEQ ID NO: 526811 - RNA, 32 nt, Human
ugguccaggguaagaaugggaucgguggagag

SEQ ID NO: 526812 - RNA, 32 nt, Human
ugguccagguucuucuagaugucugcacaaau

SEQ ID NO: 526813 - RNA, 32 nt, Human
ugguccaguacuuccugaagcagaucaacaaa

SEQ ID NO: 526814 - RNA, 32 nt, Human
ugguccagucaaggugacagagacaacgugac

SEQ ID NO: 526815 - RNA, 18 nt, Human
ugguccagucucccagca

SEQ ID NO: 526816 - RNA, 32 nt, Human
ugguccaguucugcaccgggguggggcuggga

SEQ ID NO: 526817 - RNA, 32 nt, Human
ugguccauacagagaaacugugguccuuuaua

SEQ ID NO: 526818 - RNA, 32 nt, Human
ugguccauagggcucucucagggagagagcag

SEQ ID NO: 526819 - RNA, 32 nt, Human
ugguccaucaaauuacaacagccaagauuaca

SEQ ID NO: 526820 - RNA, 32 nt, Human
ugguccauccuccaggcauccauguccaccau

SEQ ID NO: 526821 - RNA, 21 nt, Human
ugguccaugaugucaucaggc

SEQ ID NO: 526822 - RNA, 31 nt, Human
ugguccaugcuuuucugacguucucagaaua

SEQ ID NO: 526823 - RNA, 32 nt, Human
ugguccauggccaggauucugugcuucagaac

SEQ ID NO: 526824 - RNA, 32 nt, Human
uggucccaacuacuugggaggcugcaccagga

SEQ ID NO: 526825 - RNA, 32 nt, Human
uggucccacagcuggguuccaccugaagagcc

SEQ ID NO: 526826 - RNA, 32 nt, Human
uggucccaccgcacuccagccugggcaacaga

SEQ ID NO: 526827 - RNA, 32 nt, Human
uggucccacgccgccucugcucagaccacugu

SEQ ID NO: 526828 - RNA, 32 nt, Human
uggucccacugcagcugcccagucuuccaucu

SEQ ID NO: 526829 - RNA, 32 nt, Human
uggucccagagggagaggaggugggcugugcc

SEQ ID NO: 526830 - RNA, 32 nt, Human
uggucccagauggccagguguacugggugacc

SEQ ID NO: 526831 - RNA, 32 nt, Human
uggucccagcacuuugggaggccgagguggau

SEQ ID NO: 526832 - RNA, 32 nt, Human
uggucccagcacuuugggaggcugaggugggu

SEQ ID NO: 526833 - RNA, 32 nt, Human
uggucccagcagaagugacuggcggggaccag

SEQ ID NO: 526834 - RNA, 32 nt, Human
uggucccagccgcucgggaggcugaggcagga

SEQ ID NO: 526835 - RNA, 32 nt, Human
uggucccagcuacaggggaggcugagacgcaa

SEQ ID NO: 526836 - RNA, 32 nt, Human
uggucccagcuacaugggaggcugaggcagga

SEQ ID NO: 526837 - RNA, 32 nt, Human
uggucccagcuacccgggaggcugaguuggga

SEQ ID NO: 526838 - RNA, 32 nt, Human
uggucccagcuacuagggaggcugagccagga

SEQ ID NO: 526839 - RNA, 32 nt, Human
uggucccagcuacucaacaggcugagguuggg

SEQ ID NO: 526840 - RNA, 32 nt, Human
uggucccagcuacucaagaggcugaggugaga

SEQ ID NO: 526841 - RNA, 32 nt, Human
uggucccagcuacucagagggcugagguggga

SEQ ID NO: 526842 - RNA, 32 nt, Human
uggucccagcuacucaggaggcugaggcagaa

SEQ ID NO: 526843 - RNA, 32 nt, Human
uggucccagcuacucaggaggcugaggcugga

SEQ ID NO: 526844 - RNA, 32 nt, Human
uggucccagcuacucaggaggcugagguggaa

SEQ ID NO: 526845 - RNA, 32 nt, Human
uggucccagcuacucaggaggcugagguggga

SEQ ID NO: 526846 - RNA, 32 nt, Human
uggucccagcuacuccagaggcugagguggga

SEQ ID NO: 526847 - RNA, 32 nt, Human
uggucccagcuacucgggaggcugaggcacaa

SEQ ID NO: 526848 - RNA, 32 nt, Human
uggucccagcuacucgggaggcugaggcagga

SEQ ID NO: 526849 - RNA, 32 nt, Human
uggucccagcuacucgggaggcugagggggaa

SEQ ID NO: 526850 - RNA, 32 nt, Human
uggucccagcuacucgggaggcugagguggga

SEQ ID NO: 526851 - RNA, 32 nt, Human
uggucccagcuacucgggaggcugugguggga

SEQ ID NO: 526852 - RNA, 32 nt, Human
uggucccagcuacucuggaggcuaagguggga

SEQ ID NO: 526853 - RNA, 32 nt, Human
uggucccagcuacucuggaggcugaggcggaa

SEQ ID NO: 526854 - RNA, 32 nt, Human
uggucccagcuacucuggaggcugagguggga

SEQ ID NO: 526855 - RNA, 32 nt, Human
uggucccagcuacugaggaggcugagguggga

SEQ ID NO: 526856 - RNA, 32 nt, Human
uggucccagcuacuggggaggcugaggcagga

SEQ ID NO: 526857 - RNA, 32 nt, Human
uggucccagcuacuggggaggcugagguggga

SEQ ID NO: 526858 - RNA, 32 nt, Human
uggucccagcuacuugagaggcugagguggga

SEQ ID NO: 526859 - RNA, 32 nt, Human
uggucccagcuacuugggaggcugagguggga

SEQ ID NO: 526860 - RNA, 32 nt, Human
uggucccagcuagccgguaggcugagguggga

SEQ ID NO: 526861 - RNA, 32 nt, Human
uggucccagcuauucaggaggcugagguggga

SEQ ID NO: 526862 - RNA, 32 nt, Human
uggucccagcuauucgggaggcugaggcagga

SEQ ID NO: 526863 - RNA, 32 nt, Human
uggucccagcuauuugggaggcugagguggga

SEQ ID NO: 526864 - RNA, 32 nt, Human
uggucccagcucccaaggagguugcagaagua

SEQ ID NO: 526865 - RNA, 32 nt, Human
uggucccagcuccucaggaggcugagguggga

SEQ ID NO: 526866 - RNA, 32 nt, Human
uggucccagcugcucgggaggcugagcaggag

SEQ ID NO: 526867 - RNA, 32 nt, Human
uggucccagcugcucgggaggcugaggcagga

SEQ ID NO: 526868 - RNA, 32 nt, Human
uggucccagcugcuggggaggcugagguggga

SEQ ID NO: 526869 - RNA, 32 nt, Human
uggucccagcugcuugggaggcugaggcagga

SEQ ID NO: 526870 - RNA, 32 nt, Human
uggucccagcuucuugggaggcugagguggga

SEQ ID NO: 526871 - RNA, 32 nt, Human
uggucccaggagaaggucugggggucacuagc

SEQ ID NO: 526872 - RNA, 32 nt, Human
uggucccaggaguucaagaccagccuguggaa

SEQ ID NO: 526873 - RNA, 32 nt, Human
uggucccagguacuugagaggcugaggcagga

SEQ ID NO: 526874 - RNA, 32 nt, Human
uggucccagguacuugggaggcugagguggga

SEQ ID NO: 526875 - RNA, 32 nt, Human
uggucccagguuucuccaucccuucuuccuuu

SEQ ID NO: 526876 - RNA, 32 nt, Human
uggucccaguuacucggaaggcugaggugggc

SEQ ID NO: 526877 - RNA, 32 nt, Human
uggucccaguuacuugggaggcugacgugggu

SEQ ID NO: 526878 - RNA, 32 nt, Human
uggucccaguuucuugggaggcugaggcggga

SEQ ID NO: 526879 - RNA, 32 nt, Human
uggucccaucugcuugggaggcugagguugca

SEQ ID NO: 526880 - RNA, 32 nt, Human
uggucccaucuucugcccgcuccuccaggaaa

SEQ ID NO: 526881 - RNA, 32 nt, Human
ugguccccaaaccaaagaguugccugcagguu

SEQ ID NO: 526882 - RNA, 32 nt, Human
ugguccccaaccacaguccuggugaagaugug

SEQ ID NO: 526883 - RNA, 32 nt, Human
ugguccccacacccccagguuggguggguuuu

SEQ ID NO: 526884 - RNA, 32 nt, Human
ugguccccaucccugucucucccuuucacccu

SEQ ID NO: 526885 - RNA, 32 nt, Human
uggucccccagccucucuugggcuuucuuaca

SEQ ID NO: 526886 - RNA, 32 nt, Human
ugguccccgugguugaauuggaagaggccaua

SEQ ID NO: 526887 - RNA, 32 nt, Human
ugguccccuaaacaaucucuuccucagccagc

SEQ ID NO: 526888 - RNA, 32 nt, Human
ugguccccuccucugcuuuagccccggcaagc

SEQ ID NO: 526889 - RNA, 32 nt, Human
ugguccccugcucugcccucgugcuuugcugg

SEQ ID NO: 526890 - RNA, 32 nt, Human
ugguccccuuaaaugccaaucuuccauauuag

SEQ ID NO: 526891 - RNA, 32 nt, Human
ugguccccuuucucccuccugcuucucaccug

SEQ ID NO: 526892 - RNA, 32 nt, Human
uggucccggcugcucgggaggcugaggcaggg

SEQ ID NO: 526893 - RNA, 32 nt, Human
uggucccggcugcuuggaaggcugaggcgggg

SEQ ID NO: 526894 - RNA, 32 nt, Human
uggucccgguuacucaggaggcugaggcagaa

SEQ ID NO: 526895 - RNA, 32 nt, Human
uggucccuaagaucaaaccccauggagcagcc

SEQ ID NO: 526896 - RNA, 32 nt, Human
uggucccuaugggcuuccgcacaugccgcggg

SEQ ID NO: 526897 - RNA, 22 nt, Human
uggucccucacccaggccucca

SEQ ID NO: 526898 - RNA, 32 nt, Human
uggucccuccacuaggaguuaacuacccuaca

SEQ ID NO: 526899 - RNA, 32 nt, Human
uggucccuccauuccucuucaggcaucuggag

SEQ ID NO: 526900 - RNA, 32 nt, Human
uggucccucccagacaagcaaggccucugauu

SEQ ID NO: 526901 - RNA, 32 nt, Human
uggucccucugugcuucucucuuucuccuccc

SEQ ID NO: 526902 - RNA, 32 nt, Human
uggucccugagcaucccaggaggccgacugua

SEQ ID NO: 526903 - RNA, 32 nt, Human
uggucccugcaagcguccgcuuuccuggccaa

SEQ ID NO: 526904 - RNA, 32 nt, Human
uggucccugcagcccuucccagacacagaguu

SEQ ID NO: 526905 - RNA, 32 nt, Human
uggucccugcccuccccugcucccagguugag

SEQ ID NO: 526906 - RNA, 32 nt, Human
uggucccugccuggcugagguggcagcagggg

SEQ ID NO: 526907 - RNA, 32 nt, Human
uggucccugcuuucucuuucucuuucucugug

SEQ ID NO: 526908 - RNA, 32 nt, Human
uggucccuggcaacaggaaccugggcagcuua

SEQ ID NO: 526909 - RNA, 32 nt, Human
uggucccuggggauggggcggcgguagcagcu

SEQ ID NO: 526910 - RNA, 32 nt, Human
uggucccugucucccuucuuguacaauccaga

SEQ ID NO: 526911 - RNA, 32 nt, Human
uggucccuguggucccagcuacucuggaggcu

SEQ ID NO: 526912 - RNA, 32 nt, Human
uggucccuugauacauuguccuuuaccucaca

SEQ ID NO: 526913 - RNA, 32 nt, Human
ugguccgcagaggcccuccugugcgccacuug

SEQ ID NO: 526914 - RNA, 32 nt, Human
ugguccgccgcuaccuucaccaccuccugcug

SEQ ID NO: 526915 - RNA, 32 nt, Human
ugguccggacucagcaucauuuuggaggcuga

SEQ ID NO: 526916 - RNA, 22 nt, Human
ugguccgucgcucgccugggug

SEQ ID NO: 526917 - RNA, 32 nt, Human
ugguccguguguggccuagcucauuccauguc

SEQ ID NO: 526918 - RNA, 32 nt, Human
ugguccuagagaaaagacuaugucauuuacug

SEQ ID NO: 526919 - RNA, 32 nt, Human
ugguccuagaggaagcauuggggugggggagg

SEQ ID NO: 526920 - RNA, 32 nt, Human
ugguccuagccucuuggagggcugagguggga

SEQ ID NO: 526921 - RNA, 32 nt, Human
ugguccuagcuacucaggaggcugaggcagga

SEQ ID NO: 526922 - RNA, 32 nt, Human
ugguccuagcuacucgggaggcugaggcagga

SEQ ID NO: 526923 - RNA, 32 nt, Human
ugguccuagcuacuugggaggcugaaguggga

SEQ ID NO: 526924 - RNA, 32 nt, Human
ugguccuagcuacuugggaggcugagguguga

SEQ ID NO: 526925 - RNA, 32 nt, Human
ugguccuagcuauucaggaaacugagguggga

SEQ ID NO: 526926 - RNA, 32 nt, Human
ugguccuagcuauucaggaggcugacauagga

SEQ ID NO: 526927 - RNA, 32 nt, Human
ugguccuagcuccucgggaggcugaggcagga

SEQ ID NO: 526928 - RNA, 32 nt, Human
ugguccuagggagggcggaaagggaggcacug

SEQ ID NO: 526929 - RNA, 32 nt, Human
ugguccuagggugggaaggggcuagggaggac

SEQ ID NO: 526930 - RNA, 32 nt, Human
ugguccucagggucuccggccucggcacauua

SEQ ID NO: 526931 - RNA, 32 nt, Human
ugguccucaucuuggucccuuccaaucugaaa

SEQ ID NO: 526932 - RNA, 32 nt, Human
ugguccucaucuuuacuuaaaaagcucuuaua

SEQ ID NO: 526933 - RNA, 32 nt, Human
ugguccucauguuucuggguaaggaagagacc

SEQ ID NO: 526934 - RNA, 32 nt, Human
ugguccucauuuuucuuuuggugcagaaccgu

SEQ ID NO: 526935 - RNA, 32 nt, Human
ugguccucccaaagugcugggauuaauggcgu

SEQ ID NO: 526936 - RNA, 32 nt, Human
ugguccuccucgcuauguuggaaaugugcaac

SEQ ID NO: 526937 - RNA, 32 nt, Human
ugguccuccugccucagccucccacaggaucg

SEQ ID NO: 526938 - RNA, 32 nt, Human
ugguccuccugccucagcuuccaaaggcacag

SEQ ID NO: 526939 - RNA, 32 nt, Human
ugguccucggugguuaucugcagcuuguuaau

SEQ ID NO: 526940 - RNA, 32 nt, Human
ugguccucuagaugggcacgaaugccauuggc

SEQ ID NO: 526941 - RNA, 32 nt, Human
ugguccucuggguuuccaggaaauugucuagc

SEQ ID NO: 526942 - RNA, 32 nt, Human
ugguccucugugccugguggggugggggugcc

SEQ ID NO: 526943 - RNA, 32 nt, Human
ugguccucuuucuccaacaccuagccugagac

SEQ ID NO: 526944 - RNA, 32 nt, Human
ugguccugaccaucuggggcacgagggccugg

SEQ ID NO: 526945 - RNA, 32 nt, Human
ugguccugagucaggagguugaggcugcagug

SEQ ID NO: 526946 - RNA, 32 nt, Human
ugguccugauguccuuugaggcuucuuuagcu

SEQ ID NO: 526947 - RNA, 32 nt, Human
ugguccugauugaauagaagaccccagagguu

SEQ ID NO: 526948 - RNA, 32 nt, Human
ugguccugcacugggggcuggaacacagacuu

SEQ ID NO: 526949 - RNA, 32 nt, Human
ugguccugcacugucccggagcucaggcccug

SEQ ID NO: 526950 - RNA, 32 nt, Human
ugguccugcccuucucccugcaugccuguggg

SEQ ID NO: 526951 - RNA, 32 nt, Human
ugguccuggcaucugcuguacaugucuguagg

SEQ ID NO: 526952 - RNA, 32 nt, Human
ugguccuggccacgcaguaccugccaagggcu

SEQ ID NO: 526953 - RNA, 32 nt, Human
ugguccuggccuccaccugcccucucuucccu

SEQ ID NO: 526954 - RNA, 32 nt, Human
ugguccuggcugugcugcugcaccagggccgc

SEQ ID NO: 526955 - RNA, 32 nt, Human
ugguccugggaagcaagcacuuuuccauuucc

SEQ ID NO: 526956 - RNA, 32 nt, Human
ugguccugggcuguggguaggggcuagggccg

SEQ ID NO: 526957 - RNA, 32 nt, Human
ugguccugggggcuggggcuggagaggccgcu

SEQ ID NO: 526958 - RNA, 32 nt, Human
ugguccugguguggacuacugugggagcaggg

SEQ ID NO: 526959 - RNA, 32 nt, Human
ugguccugguuauggguuauggagagggcugc

SEQ ID NO: 526960 - RNA, 32 nt, Human
ugguccuguacccagaggucccagggaucggc

SEQ ID NO: 526961 - RNA, 32 nt, Human
ugguccuguucuaugguggggcucccuugcca

SEQ ID NO: 526962 - RNA, 32 nt, Human
ugguccuguugaucccagucucugccagacca

SEQ ID NO: 526963 - RNA, 32 nt, Human
ugguccuuagccccaugccucuuccaaaacag

SEQ ID NO: 526964 - RNA, 32 nt, Human
ugguccuucaguauuucugaauacuuagucua

SEQ ID NO: 526965 - RNA, 32 nt, Human
ugguccuuccugccugagcccugcacuguccc

SEQ ID NO: 526966 - RNA, 21 nt, Human
ugguccuuggggaggcugcca

SEQ ID NO: 526967 - RNA, 21 nt, Human
ugguccuuguccauucucuca

SEQ ID NO: 526968 - RNA, 32 nt, Human
ugguccuuguguugugagcuccuuguuccugc

SEQ ID NO: 526969 - RNA, 32 nt, Human
ugguccuuuuuaaacuacuaguuuuaaaaacc

SEQ ID NO: 526970 - RNA, 32 nt, Human
uggucgagauggggugucccuguguugcccag

SEQ ID NO: 526971 - RNA, 32 nt, Human
uggucgaggcuaguggagucccagggaccgcu

SEQ ID NO: 526972 - RNA, 32 nt, Human
uggucgcagcugcucgggaggcugaggcagga

SEQ ID NO: 526973 - RNA, 31 nt, Human
uggucgcauuuucccugccuaccucacagag

SEQ ID NO: 526974 - RNA, 32 nt, Human
uggucgccuaucuccuuccucugcucccuggu

SEQ ID NO: 526975 - RNA, 24 nt, Human
uggucgccuccauuagugugccac

SEQ ID NO: 526976 - RNA, 32 nt, Human
uggucgccugccccacucccuccuggaaaugu

SEQ ID NO: 526977 - RNA, 32 nt, Human
uggucgccuggaggaagccggaggccugcgug

SEQ ID NO: 526978 - RNA, 32 nt, Human
uggucgccuugcuugccagcaguugcucccuu

SEQ ID NO: 526979 - RNA, 32 nt, Human
uggucgcucucagaccccacuguccaccgggg

SEQ ID NO: 526980 - RNA, 32 nt, Human
uggucgcugcucgcgcggucuccugggugacg

SEQ ID NO: 526981 - RNA, 32 nt, Human
uggucgcuucuucuccuuggauuuguuaagga

SEQ ID NO: 526982 - RNA, 32 nt, Human
uggucggaagugagugaaggagccaggucgcc

SEQ ID NO: 526983 - RNA, 32 nt, Human
uggucggaggcagagguguuuccagugaucgg

SEQ ID NO: 526984 - RNA, 32 nt, Human
uggucgggccggccuuccccagcccucugggg

SEQ ID NO: 526985 - RNA, 32 nt, Human
uggucggggagcugggguacagguuuggggag

SEQ ID NO: 526986 - RNA, 32 nt, Human
uggucgggggccugggcuggugcuucaugguc

SEQ ID NO: 526987 - RNA, 32 nt, Human
uggucggggugagaacccaagcguuggaacug

SEQ ID NO: 526988 - RNA, 32 nt, Human
uggucgguaguaaccagggccucuccaagccc

SEQ ID NO: 526989 - RNA, 32 nt, Human
uggucguccucacugcucacuauaugcuaauu

SEQ ID NO: 526990 - RNA, 32 nt, Human
uggucgucuaucucccuguuguucuucccauc

SEQ ID NO: 526991 - RNA, 32 nt, Human
uggucgugugugugcggaguccacggaagccu

SEQ ID NO: 526992 - RNA, 32 nt, Human
uggucguucuggcaaaggcgcacacugacuuu

SEQ ID NO: 526993 - RNA, 32 nt, Human
uggucuaaaaauaaucccagcacuuugggagg

SEQ ID NO: 526994 - RNA, 32 nt, Human
uggucuacacacacagaggaugcuggauacug

SEQ ID NO: 526995 - RNA, 32 nt, Human
uggucuacauggugaaaccccaucucaacuaa

SEQ ID NO: 526996 - RNA, 32 nt, Human
uggucuacccuuuucucacuguagcugcuggc

SEQ ID NO: 526997 - RNA, 32 nt, Human
uggucuacuuuuuccuguaggauuuuauugua

SEQ ID NO: 526998 - RNA, 32 nt, Human
uggucuagaggcugcuggcccaagagccaggc

SEQ ID NO: 526999 - RNA, 32 nt, Human
uggucuagagguggagcacagugaaagaauuc

SEQ ID NO: 527000 - RNA, 31 nt, Human
uggucuaggauagccuuacucacuugccugg

SEQ ID NO: 527001 - RNA, 32 nt, Human
uggucuagggacguucucucuccaguccucag

SEQ ID NO: 527002 - RNA, 32 nt, Human
uggucuauucagaaucaaaccuuuuuauauuu

SEQ ID NO: 527003 - RNA, 23 nt, Human
uggucucaaaaaccuuugaggaa

SEQ ID NO: 527004 - RNA, 22 nt, Human
uggucucaaccuccugggcuca

SEQ ID NO: 527005 - RNA, 32 nt, Human
uggucucaacuacucaggaggcugaggcugga

SEQ ID NO: 527006 - RNA, 25 nt, Human
uggucucaagugauccgcccgccuc

SEQ ID NO: 527007 - RNA, 32 nt, Human
uggucucaccucggcugcagaaacccacccug

SEQ ID NO: 527008 - RNA, 32 nt, Human
uggucucacugcaaccucuaccucccagguuc

SEQ ID NO: 527009 - RNA, 32 nt, Human
uggucucagagaacacaguagauguguaguca

SEQ ID NO: 527010 - RNA, 32 nt, Human
uggucucagauacuugggaggcugagguggga

SEQ ID NO: 527011 - RNA, 32 nt, Human
uggucucagcacuuugggaggcugaagugggu

SEQ ID NO: 527012 - RNA, 32 nt, Human
uggucucagcuacucaggaggcugagguggga

SEQ ID NO: 527013 - RNA, 32 nt, Human
uggucucagcuacucagggggcugaggcugga

SEQ ID NO: 527014 - RNA, 32 nt, Human
uggucucagcuacucgggaggcugagguggga

SEQ ID NO: 527015 - RNA, 32 nt, Human
uggucucagcuacuugggaggcugaggcagga

SEQ ID NO: 527016 - RNA, 32 nt, Human
uggucucagcuacuugggaggcugagguggga

SEQ ID NO: 527017 - RNA, 32 nt, Human
uggucucagcuacuugggaggcugggguggga

SEQ ID NO: 527018 - RNA, 32 nt, Human
uggucucagcuauucaggaggccaaggcagga

SEQ ID NO: 527019 - RNA, 32 nt, Human
uggucucagcuauucaggaggcugaggcagga

SEQ ID NO: 527020 - RNA, 32 nt, Human
uggucucagguguggacucggcaagaaccagc

SEQ ID NO: 527021 - RNA, 32 nt, Human
uggucucagugacugaaaacucaacccaaacu

SEQ ID NO: 527022 - RNA, 32 nt, Human
uggucucauccauuccuuugcuuuuucauacc

SEQ ID NO: 527023 - RNA, 32 nt, Human
uggucucauccucugcuuccuuugccuuuacc

SEQ ID NO: 527024 - RNA, 32 nt, Human
uggucucauguugaccuuagaguuugggauuc

SEQ ID NO: 527025 - RNA, 22 nt, Human
uggucuccaacuccugagcuca

SEQ ID NO: 527026 - RNA, 22 nt, Human
uggucuccaacuccuggacuca

SEQ ID NO: 527027 - RNA, 22 nt, Human
uggucuccaacuccugggcuca

SEQ ID NO: 527028 - RNA, 32 nt, Human
uggucuccauucucuucagcucccuacauggg

SEQ ID NO: 527029 - RNA, 22 nt, Human
uggucuccccacagaccgcagg

SEQ ID NO: 527030 - RNA, 32 nt, Human
uggucucccccgcccggggacccccugugccu

SEQ ID NO: 527031 - RNA, 32 nt, Human
uggucucccgguuauuuuaauagagcugaacc

SEQ ID NO: 527032 - RNA, 32 nt, Human
uggucucccugggggcuccccaguggcucugc

SEQ ID NO: 527033 - RNA, 32 nt, Human
uggucuccgucccucuaucucuggcuccugca

SEQ ID NO: 527034 - RNA, 32 nt, Human
uggucuccuagagaugagugcuugggauuucu

SEQ ID NO: 527035 - RNA, 32 nt, Human
uggucuccuuucugguccuuuuuaggcaccug

SEQ ID NO: 527036 - RNA, 32 nt, Human
uggucucgaacuccugaucucaugauccaccc

SEQ ID NO: 527037 - RNA, 32 nt, Human
uggucucgaucuccugaccucuugaucugccc

SEQ ID NO: 527038 - RNA, 32 nt, Human
uggucucggucccaggguggucccagcuggug

SEQ ID NO: 527039 - RNA, 32 nt, Human
uggucucuauugaccaauguauuucaaacuuu

SEQ ID NO: 527040 - RNA, 32 nt, Human
uggucucucuccagauaccccacgaggaagca

SEQ ID NO: 527041 - RNA, 32 nt, Human
uggucucucuuacaccagcuccugccucacaa

SEQ ID NO: 527042 - RNA, 32 nt, Human
uggucucugaagacugggcaggccuguacuuu

SEQ ID NO: 527043 - RNA, 32 nt, Human
uggucucugaaucagugugcagcugggguccc

SEQ ID NO: 527044 - RNA, 32 nt, Human
uggucucugaauugaaaugcugucuacugaaa

SEQ ID NO: 527045 - RNA, 32 nt, Human
uggucucugcauggaccccagggcugugggga

SEQ ID NO: 527046 - RNA, 32 nt, Human
uggucucugccugacccagccaccccacugug

SEQ ID NO: 527047 - RNA, 32 nt, Human
uggucucugccugggcucaaccucugugauuu

SEQ ID NO: 527048 - RNA, 32 nt, Human
uggucucugcuccagauaacucucuuuccuug

SEQ ID NO: 527049 - RNA, 32 nt, Human
uggucucuggcaagccucccacccccaaacga

SEQ ID NO: 527050 - RNA, 32 nt, Human
uggucucuggcagugggauccuggagaggaga

SEQ ID NO: 527051 - RNA, 32 nt, Human
uggucucuguagcugagagagacagagcugga

SEQ ID NO: 527052 - RNA, 32 nt, Human
uggucucuguccuguacccucuaccuccuucc

SEQ ID NO: 527053 - RNA, 32 nt, Human
uggucucugucuucaaagccagaaggaggacg

SEQ ID NO: 527054 - RNA, 32 nt, Human
uggucugaauguggacccucucuccccgaccu

SEQ ID NO: 527055 - RNA, 32 nt, Human
uggucugacugcacugucuccaucuuaugcaa

SEQ ID NO: 527056 - RNA, 32 nt, Human
uggucugagccccagcccuacagaggggccug

SEQ ID NO: 527057 - RNA, 32 nt, Human
uggucugcacacaccugcacacaccugcacac

SEQ ID NO: 527058 - RNA, 23 nt, Human
uggucugcaggcagggcugacuc

SEQ ID NO: 527059 - RNA, 32 nt, Human
uggucugcccugcagcuguugggcugggagcu

SEQ ID NO: 527060 - RNA, 32 nt, Human
uggucugcuccugcaccaaagccauaugggug

SEQ ID NO: 527061 - RNA, 32 nt, Human
uggucuggaagaaacaucuaucaagcaacaca

SEQ ID NO: 527062 - RNA, 32 nt, Human
uggucuggacaccaccuggccuggugggagag

SEQ ID NO: 527063 - RNA, 32 nt, Human
uggucuggaucucuugaccucaggugauccau

SEQ ID NO: 527064 - RNA, 23 nt, Human
uggucuggccacugucccaggcu

SEQ ID NO: 527065 - RNA, 32 nt, Human
uggucuggccuagguuaagugugcaagauaac

SEQ ID NO: 527066 - RNA, 32 nt, Human
uggucugggaggaucacaggaugucaaggccu

SEQ ID NO: 527067 - RNA, 32 nt, Human
uggucugggcugucuaccuuccucacuguauc

SEQ ID NO: 527068 - RNA, 32 nt, Human
uggucuggggcugagggcaaggacugcacuag

SEQ ID NO: 527069 - RNA, 32 nt, Human
uggucugggggaggggacacccccggaggcug

SEQ ID NO: 527070 - RNA, 26 nt, Human
uggucuggucucuuguuugccaggcu

SEQ ID NO: 527071 - RNA, 32 nt, Human
uggucugguguuggcgugugggagacaugugu

SEQ ID NO: 527072 - RNA, 32 nt, Human
uggucuguauggcuccgcccugggcaggagga

SEQ ID NO: 527073 - RNA, 32 nt, Human
uggucuguccucacaugugcacugguaacaga

SEQ ID NO: 527074 - RNA, 32 nt, Human
uggucugucgccaggcuggagugcaguggcgc

SEQ ID NO: 527075 - RNA, 32 nt, Human
uggucugucgcccaggcuggagugcaguagca

SEQ ID NO: 527076 - RNA, 32 nt, Human
uggucugucugccccgccugucuggcugucag

SEQ ID NO: 527077 - RNA, 32 nt, Human
uggucugucuggagcagcugcagccgcagcug

SEQ ID NO: 527078 - RNA, 18 nt, Human
uggucugugcugcuguua

SEQ ID NO: 527079 - RNA, 20 nt, Human
uggucugugcuucuuccaua

SEQ ID NO: 527080 - RNA, 32 nt, Human
uggucugugcuugguuuaacagcuccaacaau

SEQ ID NO: 527081 - RNA, 32 nt, Human
uggucugugucgcuguccccagucccaccgca

SEQ ID NO: 527082 - RNA, 32 nt, Human
uggucuguuacccaggcuggagugcaguggca

SEQ ID NO: 527083 - RNA, 32 nt, Human
uggucuguucuaagccacaaccccugucucag

SEQ ID NO: 527084 - RNA, 32 nt, Human
uggucuguugcccaggcuggaaugcaguggug

SEQ ID NO: 527085 - RNA, 32 nt, Human
uggucuguugcccaggcuggagugcaguggug

SEQ ID NO: 527086 - RNA, 32 nt, Human
uggucuuagugguggaucaucagguagacaag

SEQ ID NO: 527087 - RNA, 32 nt, Human
uggucuucacauauacucucaaagcuagucug

SEQ ID NO: 527088 - RNA, 32 nt, Human
uggucuucauaagguuugaaaaccuaacaucu

SEQ ID NO: 527089 - RNA, 32 nt, Human
uggucuucaucaccugaggccaccaggcucaa

SEQ ID NO: 527090 - RNA, 32 nt, Human
uggucuucauuucuccuuagucuccuccaggc

SEQ ID NO: 527091 - RNA, 32 nt, Human
uggucuucuacccugucuucuauguuuguauc

SEQ ID NO: 527092 - RNA, 20 nt, Human
uggucuucuccagacuggug

SEQ ID NO: 527093 - RNA, 22 nt, Human
uggucuugaacaccugaccuca

SEQ ID NO: 527094 - RNA, 32 nt, Human
uggucuugaacuccuagguugaagggaucuuc

SEQ ID NO: 527095 - RNA, 32 nt, Human
uggucuugaacuccugaccuugugauccgcuc

SEQ ID NO: 527096 - RNA, 18 nt, Human
uggucuugacuugucaua

SEQ ID NO: 527097 - RNA, 32 nt, Human
uggucuugaucuccuaaccucuugaucugccc

SEQ ID NO: 527098 - RNA, 32 nt, Human
uggucuugaucuccugaccucaugauccaccc

SEQ ID NO: 527099 - RNA, 32 nt, Human
uggucuugcacccugcucacugcuggcaucac

SEQ ID NO: 527100 - RNA, 32 nt, Human
uggucuugcccagcugggcugccucagguguc

SEQ ID NO: 527101 - RNA, 32 nt, Human
uggucuugccccaucacugcgccacugcuccg

SEQ ID NO: 527102 - RNA, 32 nt, Human
uggucuugcugaccagccuggccggcuggcgg

SEQ ID NO: 527103 - RNA, 32 nt, Human
uggucuugcuucaguguugauggcuacugacu

SEQ ID NO: 527104 - RNA, 32 nt, Human
uggucuuggauugucugaccucaguagcuauu

SEQ ID NO: 527105 - RNA, 32 nt, Human
uggucuugggccaguucucccacgacggcuca

SEQ ID NO: 527106 - RNA, 32 nt, Human
uggucuugggcuguguucagccacuuugccuu

SEQ ID NO: 527107 - RNA, 18 nt, Human
uggucuugguccugaaua

SEQ ID NO: 527108 - RNA, 19 nt, Human
uggucuuguauuccuuccu

SEQ ID NO: 527109 - RNA, 20 nt, Human
uggucuuucugggccuuacu

SEQ ID NO: 527110 - RNA, 32 nt, Human
uggucuuugaggauguagaugugaacuucacc

SEQ ID NO: 527111 - RNA, 20 nt, Human
uggucuuugcugugccuucu

SEQ ID NO: 527112 - RNA, 32 nt, Human
uggucuuugcuuuugcagggccuucugugcag

SEQ ID NO: 527113 - RNA, 20 nt, Human
uggucuuuguaucuuccaua

SEQ ID NO: 527114 - RNA, 32 nt, Human
uggucuuuucccaaggcucuuccagaccugca

SEQ ID NO: 527115 - RNA, 32 nt, Human
uggucuuuuguaguggagaaccuccucccugg

SEQ ID NO: 527116 - RNA, 32 nt, Human
uggugaaaaaucaaggggacucaucucucgcc

SEQ ID NO: 527117 - RNA, 32 nt, Human
uggugaaaaggacuccgggggccaggugcugu

SEQ ID NO: 527118 - RNA, 32 nt, Human
uggugaaaaggagccaaauucaccugcagggc

SEQ ID NO: 527119 - RNA, 32 nt, Human
uggugaaacaccgucuccacuaaaaauagaaa

SEQ ID NO: 527120 - RNA, 32 nt, Human
uggugaaacauggugaaaccccgucucuacua

SEQ ID NO: 527121 - RNA, 32 nt, Human
uggugaaacccaugggcaggguggguggaggg

SEQ ID NO: 527122 - RNA, 32 nt, Human
uggugaaaccccaucucuaccaaaaauacaaa

SEQ ID NO: 527123 - RNA, 32 nt, Human
uggugaaaccccaucucuaccaaaaauacagg

SEQ ID NO: 527124 - RNA, 32 nt, Human
uggugaaacuagccuggaauaaugccaccaga

SEQ ID NO: 527125 - RNA, 32 nt, Human
uggugaaacuccgucucuacuaaaaauagaaa

SEQ ID NO: 527126 - RNA, 32 nt, Human
uggugaaacugacccaaauauguaauaaauac

SEQ ID NO: 527127 - RNA, 19 nt, Human
uggugaaagacuuagcgga

SEQ ID NO: 527128 - RNA, 32 nt, Human
uggugaaaugccgucucuacuaaaaauacaaa

SEQ ID NO: 527129 - RNA, 32 nt, Human
uggugaacuucuguggccaccaccuccugcuc

SEQ ID NO: 527130 - RNA, 21 nt, Human
uggugaagacccagggaaccc

SEQ ID NO: 527131 - RNA, 32 nt, Human
uggugaagacccagggaacccaggagggcccu

SEQ ID NO: 527132 - RNA, 32 nt, Human
uggugaagacucaugaucuuucucccaaacac

SEQ ID NO: 527133 - RNA, 32 nt, Human
uggugaagaggaagagcuccgagggccaggag

SEQ ID NO: 527134 - RNA, 32 nt, Human
uggugaagccaaagcacaggaaugcuuuaaaa

SEQ ID NO: 527135 - RNA, 32 nt, Human
uggugaagccaagagugaacugauguuucauu

SEQ ID NO: 527136 - RNA, 32 nt, Human
uggugaagcuggaaacacugagcugaguguug

SEQ ID NO: 527137 - RNA, 32 nt, Human
uggugaagcugggcccucccacccugagccuu

SEQ ID NO: 527138 - RNA, 32 nt, Human
uggugaaggacaccuccauccauuccacgcag

SEQ ID NO: 527139 - RNA, 32 nt, Human
uggugaaggagucucgcugagcucgaggaggu

SEQ ID NO: 527140 - RNA, 32 nt, Human
uggugaagggguaguggagggagccggcaugg

SEQ ID NO: 527141 - RNA, 32 nt, Human
uggugaagugaauacagaucugugaagaacaa

SEQ ID NO: 527142 - RNA, 31 nt, Human
uggugaagugagaaaaacagaaugcagcuuu

SEQ ID NO: 527143 - RNA, 32 nt, Human
uggugaagugauaucucauuauaauuuuaauu

SEQ ID NO: 527144 - RNA, 32 nt, Human
uggugaauggcugccucacauugcuccaguuu

SEQ ID NO: 527145 - RNA, 20 nt, Human
uggugacaaauucuagcaaa

SEQ ID NO: 527146 - RNA, 31 nt, Human
uggugacacagcuagggucuuccuagcagcu

SEQ ID NO: 527147 - RNA, 32 nt, Human
uggugacacucagaggggucugaacagacuug

SEQ ID NO: 527148 - RNA, 32 nt, Human
uggugacagccagauucucuacucuuauguuu

SEQ ID NO: 527149 - RNA, 32 nt, Human
uggugacaggcagcaggguggcgacauggaga

SEQ ID NO: 527150 - RNA, 23 nt, Human
uggugacaguggcgugcucaggg

SEQ ID NO: 527151 - RNA, 32 nt, Human
uggugacauauauguggcagagaugguagugc

SEQ ID NO: 527152 - RNA, 32 nt, Human
uggugaccaaccacauaacucgagacagggac

SEQ ID NO: 527153 - RNA, 24 nt, Human
uggugaccagggucuccaccaggg

SEQ ID NO: 527154 - RNA, 20 nt, Human
uggugaccaggugggcaggg

SEQ ID NO: 527155 - RNA, 32 nt, Human
uggugacccccuugauucccaccguacaaccc

SEQ ID NO: 527156 - RNA, 32 nt, Human
uggugacccuugccucuggggaaggguuagca

SEQ ID NO: 527157 - RNA, 23 nt, Human
uggugaccuccauuggugcucca

SEQ ID NO: 527158 - RNA, 32 nt, Human
uggugaccuguuggcuccacucuugucacuca

SEQ ID NO: 527159 - RNA, 21 nt, Human
uggugacucaugccuguaauc

SEQ ID NO: 527160 - RNA, 32 nt, Human
uggugacuccagccucuuucuccuggagguca

SEQ ID NO: 527161 - RNA, 32 nt, Human
uggugacuccgacaucugaaacguuuuaaguu

SEQ ID NO: 527162 - RNA, 32 nt, Human
uggugacucucaucuugcagcaggccacacug

SEQ ID NO: 527163 - RNA, 32 nt, Human
uggugacugaaacauucacacagggcucuugg

SEQ ID NO: 527164 - RNA, 32 nt, Human
uggugacugagcggagcccggugacaggaugg

SEQ ID NO: 527165 - RNA, 32 nt, Human
uggugacugagcggagcccggugacaggaugu

SEQ ID NO: 527166 - RNA, 20 nt, Human
uggugacugcgugaguggag

SEQ ID NO: 527167 - RNA, 32 nt, Human
uggugacuggagagagagcugggaggggcaca

SEQ ID NO: 527168 - RNA, 32 nt, Human
uggugacuggagagguggauuguagcuacaug

SEQ ID NO: 527169 - RNA, 32 nt, Human
uggugacuggauagcaguuuuaaguggcguuc

SEQ ID NO: 527170 - RNA, 32 nt, Human
uggugacugggucuugggaucccaggccacgc

SEQ ID NO: 527171 - RNA, 32 nt, Human
uggugacuuccucgccucucccaccccaugca

SEQ ID NO: 527172 - RNA, 32 nt, Human
uggugacuugucagugucugugucugugugug

SEQ ID NO: 527173 - RNA, 32 nt, Human
uggugacuuucugcagugaaugcaucacccuu

SEQ ID NO: 527174 - RNA, 32 nt, Human
uggugagaagugaacauuuauuaaacagaagu

SEQ ID NO: 527175 - RNA, 32 nt, Human
uggugagagguggacccaggaggaguggcagg

SEQ ID NO: 527176 - RNA, 32 nt, Human
uggugagaguccaacagacacaauuuauacug

SEQ ID NO: 527177 - RNA, 32 nt, Human
uggugagauaaauagguugaaaacaaucaucu

SEQ ID NO: 527178 - RNA, 32 nt, Human
uggugagaucagauguggccaagggaaggagc

SEQ ID NO: 527179 - RNA, 32 nt, Human
uggugagauccucuuaggacuuuuggcaauca

SEQ ID NO: 527180 - RNA, 32 nt, Human
uggugagaugacgaccuuagugcuggauaaug

SEQ ID NO: 527181 - RNA, 32 nt, Human
uggugagauuacaggcaugagccaccacaacu

SEQ ID NO: 527182 - RNA, 32 nt, Human
uggugagcacacuguccacagccuccaugaac

SEQ ID NO: 527183 - RNA, 32 nt, Human
uggugagcacugcagccucccugggcauuccc

SEQ ID NO: 527184 - RNA, 32 nt, Human
uggugagcaguggauauaugccugucaaaguc

SEQ ID NO: 527185 - RNA, 32 nt, Human
uggugagccacuggcauugggcaggcgggcca

SEQ ID NO: 527186 - RNA, 32 nt, Human
uggugagcuaaggcugaggaguggagaugacc

SEQ ID NO: 527187 - RNA, 32 nt, Human
uggugagcucacuccuuccccugaugacuggc

SEQ ID NO: 527188 - RNA, 32 nt, Human
uggugaggaagagugggguagagccaggcggc

SEQ ID NO: 527189 - RNA, 32 nt, Human
uggugaggacaggcacaaacgcaaagaaagaa

SEQ ID NO: 527190 - RNA, 21 nt, Human
uggugaggaccucaaggaccc

SEQ ID NO: 527191 - RNA, 32 nt, Human
uggugaggaggucugggcaccuccuccauggc

SEQ ID NO: 527192 - RNA, 32 nt, Human
uggugaggagugagguggcucuggccucccau

SEQ ID NO: 527193 - RNA, 32 nt, Human
uggugaggagugggagggcccagcaagcauuu

SEQ ID NO: 527194 - RNA, 32 nt, Human
uggugaggcuccggaucucaggagcagcccug

SEQ ID NO: 527195 - RNA, 32 nt, Human
uggugaggcugucaguguauggggcagcuucc

SEQ ID NO: 527196 - RNA, 32 nt, Human
uggugagggaaaagguauaauuugggauucca

SEQ ID NO: 527197 - RNA, 32 nt, Human
uggugagggccaggggacaggucggggcagua

SEQ ID NO: 527198 - RNA, 32 nt, Human
uggugagggcugggcuuuugcuguccucuucu

SEQ ID NO: 527199 - RNA, 31 nt, Human
uggugaguagauccuguuuccuuugggaaaa

SEQ ID NO: 527200 - RNA, 32 nt, Human
uggugagucgggacucagcugaggacacaucc

SEQ ID NO: 527201 - RNA, 32 nt, Human
uggugagucggugaccuggccugugaggagca

SEQ ID NO: 527202 - RNA, 32 nt, Human
uggugagugccuguaaucacagcuacuuggga

SEQ ID NO: 527203 - RNA, 32 nt, Human
uggugagugccuguaaucccagcuacucggga

SEQ ID NO: 527204 - RNA, 32 nt, Human
uggugagugccuguaaucccagcuacuuggga

SEQ ID NO: 527205 - RNA, 32 nt, Human
uggugagugccuguagucccagcuacucagga

SEQ ID NO: 527206 - RNA, 32 nt, Human
uggugaguggguacagacuaggaggacguguc

SEQ ID NO: 527207 - RNA, 32 nt, Human
uggugaguuucacaccugaagccagccaggug

SEQ ID NO: 527208 - RNA, 32 nt, Human
uggugauaaagugcgggucaaagccucuguca

SEQ ID NO: 527209 - RNA, 32 nt, Human
uggugauaauggucaccugccaugcagccuuu

SEQ ID NO: 527210 - RNA, 32 nt, Human
uggugauacagauagcaugugaggcaggcaug

SEQ ID NO: 527211 - RNA, 32 nt, Human
uggugauacuguacuccagccugagcaacaga

SEQ ID NO: 527212 - RNA, 32 nt, Human
uggugauauaaauauuuccaaaugcauuugua

SEQ ID NO: 527213 - RNA, 32 nt, Human
uggugaucaucuccucaccccaucucccaccu

SEQ ID NO: 527214 - RNA, 32 nt, Human
uggugaucuaugaucagugaucuuugauguug

SEQ ID NO: 527215 - RNA, 30 nt, Human
uggugaugacggugaaaacugaggcugcua

SEQ ID NO: 527216 - RNA, 32 nt, Human
uggugaugaggaagcauuuagcugaauaaguu

SEQ ID NO: 527217 - RNA, 32 nt, Human
uggugaugaucugcugauaugcauuuauaaag

SEQ ID NO: 527218 - RNA, 32 nt, Human
uggugauggaauagguuugugcucugauucua

SEQ ID NO: 527219 - RNA, 32 nt, Human
uggugauggccccugggcuggagcccccaugg

SEQ ID NO: 527220 - RNA, 32 nt, Human
uggugauggggaaaucagaagcuuugagaccc

SEQ ID NO: 527221 - RNA, 32 nt, Human
uggugaugggguggucugagggccaaguuaau

SEQ ID NO: 527222 - RNA, 32 nt, Human
uggugaugguuugcauccuuccuccuuugucc

SEQ ID NO: 527223 - RNA, 32 nt, Human
uggugauguaccacucccgagaauauucccau

SEQ ID NO: 527224 - RNA, 23 nt, Human
uggugaugucggcugggugcagu

SEQ ID NO: 527225 - RNA, 32 nt, Human
uggugaugucggcugggugcaguggcucaugc

SEQ ID NO: 527226 - RNA, 32 nt, Human
uggugaugucuguaaucccagcaguuugcaaa

SEQ ID NO: 527227 - RNA, 32 nt, Human
uggugauuuccagccuuuacugcuuugaagaa

SEQ ID NO: 527228 - RNA, 32 nt, Human
uggugauuugcuuucucucuuucacuugguuc

SEQ ID NO: 527229 - RNA, 24 nt, Human
uggugcaaccucagcucacugcag

SEQ ID NO: 527230 - RNA, 32 nt, Human
uggugcaaucacagcucacagcaacuucaaac

SEQ ID NO: 527231 - RNA, 32 nt, Human
uggugcaaucacagcucacugcagccucgacc

SEQ ID NO: 527232 - RNA, 32 nt, Human
uggugcaaucacagcucacugcagccuugucc

SEQ ID NO: 527233 - RNA, 32 nt, Human
uggugcaaucacaggucacugcagcccugacc

SEQ ID NO: 527234 - RNA, 32 nt, Human
uggugcaaucacugaucacugcagccuccacu

SEQ ID NO: 527235 - RNA, 32 nt, Human
uggugcaaucauagcucacugcagccuugacc

SEQ ID NO: 527236 - RNA, 32 nt, Human
uggugcaaucauagcucacugcagccuugagc

SEQ ID NO: 527237 - RNA, 32 nt, Human
uggugcaaucauagcucauugcagccuucaau

SEQ ID NO: 527238 - RNA, 32 nt, Human
uggugcaaucauggcucacugcagccucgacc

SEQ ID NO: 527239 - RNA, 32 nt, Human
uggugcaaucauggcucacugcaggcucaaag

SEQ ID NO: 527240 - RNA, 23 nt, Human
uggugcaaucucagcucacugca

SEQ ID NO: 527241 - RNA, 23 nt, Human
uggugcaaucucggcucacugca

SEQ ID NO: 527242 - RNA, 24 nt, Human
uggugcaaucucggcucacuguag

SEQ ID NO: 527243 - RNA, 32 nt, Human
uggugcaaucuugacucacugcagccucaacc

SEQ ID NO: 527244 - RNA, 24 nt, Human
uggugcaaucuuggcucacuauag

SEQ ID NO: 527245 - RNA, 23 nt, Human
uggugcaaucuuggcucacugca

SEQ ID NO: 527246 - RNA, 24 nt, Human
uggugcaaucuuggcucacugcag

SEQ ID NO: 527247 - RNA, 23 nt, Human
uggugcaaucuuggcucacugua

SEQ ID NO: 527248 - RNA, 32 nt, Human
uggugcaauuguagauggcugcagcccucgac

SEQ ID NO: 527249 - RNA, 32 nt, Human
uggugcacaccugaaaucccagcuacugaaga

SEQ ID NO: 527250 - RNA, 24 nt, Human
uggugcacaccuguaaucccagcu

SEQ ID NO: 527251 - RNA, 24 nt, Human
uggugcacaccuguaaucccaguu

SEQ ID NO: 527252 - RNA, 24 nt, Human
uggugcacaccugugaucccagcu

SEQ ID NO: 527253 - RNA, 32 nt, Human
uggugcacauccagggaagaggagugucggua

SEQ ID NO: 527254 - RNA, 32 nt, Human
uggugcaccagcugcuggaagcgcugcuuuug

SEQ ID NO: 527255 - RNA, 32 nt, Human
uggugcaccauccugaaguuacuggagguaga

SEQ ID NO: 527256 - RNA, 24 nt, Human
uggugcaccccuguaaucccagcu

SEQ ID NO: 527257 - RNA, 24 nt, Human
uggugcacgccuguaaucccagcu

SEQ ID NO: 527258 - RNA, 32 nt, Human
uggugcacgccuguaaucucagcuacuuggga

SEQ ID NO: 527259 - RNA, 24 nt, Human
uggugcacgccugugaucccagcu

SEQ ID NO: 527260 - RNA, 24 nt, Human
uggugcacgcuuguaaucccagcu

SEQ ID NO: 527261 - RNA, 32 nt, Human
uggugcacucacugugcucagcaccucaggaa

SEQ ID NO: 527262 - RNA, 24 nt, Human
uggugcacuccuguaaucccagcu

SEQ ID NO: 527263 - RNA, 32 nt, Human
uggugcagaagcagcaggaggcacuugaggag

SEQ ID NO: 527264 - RNA, 32 nt, Human
uggugcagacccagcugccuuagacagauucc

SEQ ID NO: 527265 - RNA, 32 nt, Human
uggugcagacuagguguggauuugagcucugu

SEQ ID NO: 527266 - RNA, 32 nt, Human
uggugcagagauggaggaagaagaauaugaac

SEQ ID NO: 527267 - RNA, 32 nt, Human
uggugcagaugagguuuauaucucauuuuagc

SEQ ID NO: 527268 - RNA, 32 nt, Human
uggugcagauugugggucaggcccagaagggc

SEQ ID NO: 527269 - RNA, 32 nt, Human
uggugcagccugugggcucuuaagacaggggc

SEQ ID NO: 527270 - RNA, 32 nt, Human
uggugcagcugcagacacagagcacagcucau

SEQ ID NO: 527271 - RNA, 32 nt, Human
uggugcaggccuggcaccaggaggcuugcacc

SEQ ID NO: 527272 - RNA, 21 nt, Human
uggugcaggccuguaauccca

SEQ ID NO: 527273 - RNA, 32 nt, Human
uggugcagggagcaguagcagggacagcagag

SEQ ID NO: 527274 - RNA, 32 nt, Human
uggugcagucacagcucacugcagccucgacc

SEQ ID NO: 527275 - RNA, 17 nt, Human
uggugcagucugagaca

SEQ ID NO: 527276 - RNA, 32 nt, Human
uggugcagucuuggcucacugcagccuccacc

SEQ ID NO: 527277 - RNA, 32 nt, Human
uggugcagugugaaggagggaagugacgggca

SEQ ID NO: 527278 - RNA, 32 nt, Human
uggugcaguucugagugugccucaccugcaga

SEQ ID NO: 527279 - RNA, 24 nt, Human
uggugcauaccuguaaucccagcu

SEQ ID NO: 527280 - RNA, 32 nt, Human
uggugcauaccuguaaucccagcuacucggga

SEQ ID NO: 527281 - RNA, 24 nt, Human
uggugcauaccuguaaucccaguu

SEQ ID NO: 527282 - RNA, 32 nt, Human
uggugcauauagucccagcuacucaggaggcu

SEQ ID NO: 527283 - RNA, 32 nt, Human
uggugcauccacgcacccccacccugggacuu

SEQ ID NO: 527284 - RNA, 32 nt, Human
uggugcaugccaguaauuccagcuacuuggga

SEQ ID NO: 527285 - RNA, 32 nt, Human
uggugcaugccucacaccugagccugcuuccu

SEQ ID NO: 527286 - RNA, 32 nt, Human
uggugcaugccugaaaucccagcuacuuggga

SEQ ID NO: 527287 - RNA, 32 nt, Human
uggugcaugccugcaaucccagcuacucagag

SEQ ID NO: 527288 - RNA, 24 nt, Human
uggugcaugccuguaaccccagcu

SEQ ID NO: 527289 - RNA, 32 nt, Human
uggugcaugccuguaaccccagcuacucggga

SEQ ID NO: 527290 - RNA, 22 nt, Human
uggugcaugccuguaacuccag

SEQ ID NO: 527291 - RNA, 32 nt, Human
uggugcaugccuguaacuccagauacuuggga

SEQ ID NO: 527292 - RNA, 24 nt, Human
uggugcaugccuguaagcccagcu

SEQ ID NO: 527293 - RNA, 32 nt, Human
uggugcaugccuguaauccaagauacucagga

SEQ ID NO: 527294 - RNA, 32 nt, Human
uggugcaugccuguaauccagcuacuugggag

SEQ ID NO: 527295 - RNA, 21 nt, Human
uggugcaugccuguaauccca

SEQ ID NO: 527296 - RNA, 24 nt, Human
uggugcaugccuguaaucccaacu

SEQ ID NO: 527297 - RNA, 32 nt, Human
uggugcaugccuguaaucccacuacuggggug

SEQ ID NO: 527298 - RNA, 23 nt, Human
uggugcaugccuguaaucccagc

SEQ ID NO: 527299 - RNA, 32 nt, Human
uggugcaugccuguaaucccagccacucagga

SEQ ID NO: 527300 - RNA, 24 nt, Human
uggugcaugccuguaaucccagcu

SEQ ID NO: 527301 - RNA, 32 nt, Human
uggugcaugccuguaaucccagcuacccugaa

SEQ ID NO: 527302 - RNA, 32 nt, Human
uggugcaugccuguaaucccagcuacuaggga

SEQ ID NO: 527303 - RNA, 32 nt, Human
uggugcaugccuguaaucccagcuacucagga

SEQ ID NO: 527304 - RNA, 32 nt, Human
uggugcaugccuguaaucccagcuacucggaa

SEQ ID NO: 527305 - RNA, 32 nt, Human
uggugcaugccuguaaucccagcuacucggga

SEQ ID NO: 527306 - RNA, 32 nt, Human
uggugcaugccuguaaucccagcuacucugga

SEQ ID NO: 527307 - RNA, 32 nt, Human
uggugcaugccuguaaucccagcuacuuggaa

SEQ ID NO: 527308 - RNA, 32 nt, Human
uggugcaugccuguaaucccagcuacuuggga

SEQ ID NO: 527309 - RNA, 32 nt, Human
uggugcaugccuguaaucccagcugcucagga

SEQ ID NO: 527310 - RNA, 32 nt, Human
uggugcaugccuguaaucccagcugcugggga

SEQ ID NO: 527311 - RNA, 32 nt, Human
uggugcaugccuguaaucccagcugcuuggga

SEQ ID NO: 527312 - RNA, 32 nt, Human
uggugcaugccuguaaucccagcuucuuggga

SEQ ID NO: 527313 - RNA, 24 nt, Human
uggugcaugccuguaaucccaguu

SEQ ID NO: 527314 - RNA, 32 nt, Human
uggugcaugccuguaaucccaguuacucagga

SEQ ID NO: 527315 - RNA, 32 nt, Human
uggugcaugccuguaaucccaguuacuccaga

SEQ ID NO: 527316 - RNA, 32 nt, Human
uggugcaugccuguaaucccaguuacucgaga

SEQ ID NO: 527317 - RNA, 24 nt, Human
uggugcaugccuguaaucccugcu

SEQ ID NO: 527318 - RNA, 32 nt, Human
uggugcaugccuguaaucccugcuacuuggga

SEQ ID NO: 527319 - RNA, 32 nt, Human
uggugcaugccuguaauccuagcuacucagga

SEQ ID NO: 527320 - RNA, 32 nt, Human
uggugcaugccuguaauccuagcuacucggga

SEQ ID NO: 527321 - RNA, 32 nt, Human
uggugcaugccuguaauccuagcugcuugggu

SEQ ID NO: 527322 - RNA, 24 nt, Human
uggugcaugccuguaaucucagcu

SEQ ID NO: 527323 - RNA, 32 nt, Human
uggugcaugccuguaaucucagcuacucggga

SEQ ID NO: 527324 - RNA, 32 nt, Human
uggugcaugccuguaaucucagcuacuuggga

SEQ ID NO: 527325 - RNA, 32 nt, Human
uggugcaugccuguaaucucagcugcuccgga

SEQ ID NO: 527326 - RNA, 32 nt, Human
uggugcaugccuguaauuccagcggcuuggaa

SEQ ID NO: 527327 - RNA, 32 nt, Human
uggugcaugccuguagucacagcuacuuggga

SEQ ID NO: 527328 - RNA, 32 nt, Human
uggugcaugccuguagucccagcuacucagga

SEQ ID NO: 527329 - RNA, 32 nt, Human
uggugcaugccuguagucccagcuacucggga

SEQ ID NO: 527330 - RNA, 32 nt, Human
uggugcaugccuguagucccagcuacucugga

SEQ ID NO: 527331 - RNA, 32 nt, Human
uggugcaugccuguagucccagcuacuugagu

SEQ ID NO: 527332 - RNA, 32 nt, Human
uggugcaugccuguagucccagcuacuuggga

SEQ ID NO: 527333 - RNA, 32 nt, Human
uggugcaugccuguagucccagcugcucagga

SEQ ID NO: 527334 - RNA, 32 nt, Human
uggugcaugccuguagucccagguacucagga

SEQ ID NO: 527335 - RNA, 32 nt, Human
uggugcaugccuguagucccgguuacucggga

SEQ ID NO: 527336 - RNA, 32 nt, Human
uggugcaugccuguaguccuagcuauuuggga

SEQ ID NO: 527337 - RNA, 32 nt, Human
uggugcaugccuguagucucagcuacucagga

SEQ ID NO: 527338 - RNA, 32 nt, Human
uggugcaugccuguaguuccagcuacucagga

SEQ ID NO: 527339 - RNA, 32 nt, Human
uggugcaugccuguaguuccagcuacuuggga

SEQ ID NO: 527340 - RNA, 32 nt, Human
uggugcaugccuguaguugcagcuacucaugg

SEQ ID NO: 527341 - RNA, 32 nt, Human
uggugcaugccuguaucccagcuacuugggag

SEQ ID NO: 527342 - RNA, 32 nt, Human
uggugcaugccuguauuccaggugcucaggag

SEQ ID NO: 527343 - RNA, 32 nt, Human
uggugcaugccuguauucccagcuacucagga

SEQ ID NO: 527344 - RNA, 32 nt, Human
uggugcaugccuguauucucagcuacucggga

SEQ ID NO: 527345 - RNA, 32 nt, Human
uggugcaugccugucaucccagcuacuccaga

SEQ ID NO: 527346 - RNA, 32 nt, Human
uggugcaugccugugauccuagcugcugggga

SEQ ID NO: 527347 - RNA, 32 nt, Human
uggugcaugccugugauccuggcuacuucaga

SEQ ID NO: 527348 - RNA, 24 nt, Human
uggugcaugccugugauuccagcu

SEQ ID NO: 527349 - RNA, 32 nt, Human
uggugcaugccugugauuccagcuacuuggga

SEQ ID NO: 527350 - RNA, 32 nt, Human
uggugcaugccuguggucccagcuacucagga

SEQ ID NO: 527351 - RNA, 32 nt, Human
uggugcaugccuguggucccagcuacuuggga

SEQ ID NO: 527352 - RNA, 32 nt, Human
uggugcaugccuguggucucagcuacuuggga

SEQ ID NO: 527353 - RNA, 32 nt, Human
uggugcaugccuguugucccagcuacucagga

SEQ ID NO: 527354 - RNA, 21 nt, Human
uggugcaugcugauugguucc

SEQ ID NO: 527355 - RNA, 32 nt, Human
uggugcaugggaggggagccgggccaggagua

SEQ ID NO: 527356 - RNA, 32 nt, Human
uggugcauguaauaauguugaguggcagucaa

SEQ ID NO: 527357 - RNA, 21 nt, Human
uggugcauguucuagcuccac

SEQ ID NO: 527358 - RNA, 32 nt, Human
uggugccaaugcauuccagccuggaugaugga

SEQ ID NO: 527359 - RNA, 32 nt, Human
uggugccaaugccagccagaguccugcggggg

SEQ ID NO: 527360 - RNA, 32 nt, Human
uggugccacacaccguugagguuggagugggc

SEQ ID NO: 527361 - RNA, 32 nt, Human
uggugccacagccccuggcagggacggccggc

SEQ ID NO: 527362 - RNA, 32 nt, Human
uggugccaccacugcaacuuuuguauucacag

SEQ ID NO: 527363 - RNA, 32 nt, Human
uggugccaccacugcagacuauugugguacuu

SEQ ID NO: 527364 - RNA, 32 nt, Human
uggugccacuacacuccagccuggguaaaaga

SEQ ID NO: 527365 - RNA, 32 nt, Human
uggugccacugcacuccaaccugggggacaga

SEQ ID NO: 527366 - RNA, 32 nt, Human
uggugccacugcacuccagaugaguacagaag

SEQ ID NO: 527367 - RNA, 32 nt, Human
uggugccacugcacuccagccuaggugacaga

SEQ ID NO: 527368 - RNA, 32 nt, Human
uggugccacugcacuccagccuggcgacagag

SEQ ID NO: 527369 - RNA, 32 nt, Human
uggugccacugcacuccagccugggcaacaga

SEQ ID NO: 527370 - RNA, 32 nt, Human
uggugccacugcacuccagccugggcgaaaga

SEQ ID NO: 527371 - RNA, 32 nt, Human
uggugccacugcacuccagccugggggacaga

SEQ ID NO: 527372 - RNA, 32 nt, Human
uggugccacugcacuccagccugggugacaga

SEQ ID NO: 527373 - RNA, 32 nt, Human
uggugccacugcacuccagccuggguggcaga

SEQ ID NO: 527374 - RNA, 32 nt, Human
uggugccacugcacuccagcuuaggugacaga

SEQ ID NO: 527375 - RNA, 32 nt, Human
uggugccacugcacuccaguauggaugacaua

SEQ ID NO: 527376 - RNA, 32 nt, Human
uggugccacugcacuccagucugggcaacaga

SEQ ID NO: 527377 - RNA, 32 nt, Human
uggugccacugcacucuaaccugggcgacaga

SEQ ID NO: 527378 - RNA, 32 nt, Human
uggugccacugcacuucagccugggcaacaga

SEQ ID NO: 527379 - RNA, 32 nt, Human
uggugccacugcauuccagccugggcaacaga

SEQ ID NO: 527380 - RNA, 32 nt, Human
uggugccacugcauuccagccugggugacaga

SEQ ID NO: 527381 - RNA, 32 nt, Human
uggugccacugcauuucugccuggcaacagag

SEQ ID NO: 527382 - RNA, 32 nt, Human
uggugccacugcgcuccagccugggggagggg

SEQ ID NO: 527383 - RNA, 32 nt, Human
uggugccacuggacuccagccugggagacaga

SEQ ID NO: 527384 - RNA, 32 nt, Human
uggugccacuguacuccagccugggugauagg

SEQ ID NO: 527385 - RNA, 32 nt, Human
uggugccagauaauugcauucucuccaccuga

SEQ ID NO: 527386 - RNA, 32 nt, Human
uggugccagccuggugccaucuugaaggcugg

SEQ ID NO: 527387 - RNA, 32 nt, Human
uggugccagccugucccccacugcuucuuacu

SEQ ID NO: 527388 - RNA, 32 nt, Human
uggugccagccuguuaccuguucucacugaaa

SEQ ID NO: 527389 - RNA, 32 nt, Human
uggugccagcuacuuggaaggcugagguagga

SEQ ID NO: 527390 - RNA, 32 nt, Human
uggugccagcugggcuggguguggguucugug

SEQ ID NO: 527391 - RNA, 32 nt, Human
uggugccaggccguggguucagguguggcaga

SEQ ID NO: 527392 - RNA, 31 nt, Human
uggugccagguguccauccccgugcugagau

SEQ ID NO: 527393 - RNA, 32 nt, Human
uggugccaguaugacccacuuggacucacccc

SEQ ID NO: 527394 - RNA, 32 nt, Human
uggugccagugucgccccgccuccgggguaga

SEQ ID NO: 527395 - RNA, 32 nt, Human
uggugccaucaugguucacugcagccuugacc

SEQ ID NO: 527396 - RNA, 32 nt, Human
uggugccaucauugcugucugcagccuugaac

SEQ ID NO: 527397 - RNA, 32 nt, Human
uggugccaugcuggcucacugcagccuccacc

SEQ ID NO: 527398 - RNA, 32 nt, Human
uggugccauugaacuccagucugggcuauuca

SEQ ID NO: 527399 - RNA, 32 nt, Human
uggugccauugcccuccagccugggcaagaac

SEQ ID NO: 527400 - RNA, 28 nt, Human
uggugcccaagugagucacauccaggua

SEQ ID NO: 527401 - RNA, 32 nt, Human
uggugcccacccgcauugaggguggguguccc

SEQ ID NO: 527402 - RNA, 32 nt, Human
uggugcccaccugcauugaggguggguguccc

SEQ ID NO: 527403 - RNA, 32 nt, Human
uggugcccagaagaaagagggcagcacccauu

SEQ ID NO: 527404 - RNA, 32 nt, Human
uggugcccaggccaaguagaaugagaugagac

SEQ ID NO: 527405 - RNA, 24 nt, Human
uggugcccaggcuagagugcaaug

SEQ ID NO: 527406 - RNA, 24 nt, Human
uggugcccaggcuggagugcagug

SEQ ID NO: 527407 - RNA, 32 nt, Human
uggugcccagguggaggugcaguggggguaag

SEQ ID NO: 527408 - RNA, 32 nt, Human
uggugccccaaaacuucacaaccaccuagaca

SEQ ID NO: 527409 - RNA, 32 nt, Human
uggugccccaggagagcgagaggcgccuggga

SEQ ID NO: 527410 - RNA, 32 nt, Human
uggugccccaggaggagcucagccuccugccc

SEQ ID NO: 527411 - RNA, 26 nt, Human
uggugccccccaaugccaggcuucac

SEQ ID NO: 527412 - RNA, 32 nt, Human
uggugccccuccacucuucucuuccucucuuu

SEQ ID NO: 527413 - RNA, 32 nt, Human
uggugccccugcccuccgccccaccacagcac

SEQ ID NO: 527414 - RNA, 32 nt, Human
uggugccccuggcuggccgaggagacuggcuc

SEQ ID NO: 527415 - RNA, 32 nt, Human
uggugcccgguggaggaugacacacacgugcc

SEQ ID NO: 527416 - RNA, 32 nt, Human
uggugcccgucuuccuccuaaggggccaggcc

SEQ ID NO: 527417 - RNA, 32 nt, Human
uggugcccuccugccacccaagcugcugcugg

SEQ ID NO: 527418 - RNA, 32 nt, Human
uggugcccucgagggccagacagugcagaggg

SEQ ID NO: 527419 - RNA, 32 nt, Human
uggugcccugaugcugugccuugucacccauu

SEQ ID NO: 527420 - RNA, 32 nt, Human
uggugcccugcaucccagcugcuccagccauu

SEQ ID NO: 527421 - RNA, 32 nt, Human
uggugcccuguuaaccccuuaaagcugugguu

SEQ ID NO: 527422 - RNA, 32 nt, Human
uggugccgacuuccuguuguuugaggccgggu

SEQ ID NO: 527423 - RNA, 20 nt, Human
uggugccgccuguaguccca

SEQ ID NO: 527424 - RNA, 23 nt, Human
uggugccgccuguagucccagcu

SEQ ID NO: 527425 - RNA, 32 nt, Human
uggugccggcagcugccagcgccugcccucug

SEQ ID NO: 527426 - RNA, 32 nt, Human
uggugccgucaugacuuacugcagccuugaac

SEQ ID NO: 527427 - RNA, 32 nt, Human
uggugccguugcacuccagccgggcaacaagg

SEQ ID NO: 527428 - RNA, 32 nt, Human
uggugccuauaucugagagaccugugugaacu

SEQ ID NO: 527429 - RNA, 32 nt, Human
uggugccucaguuuacccaucuguaaaauggg

SEQ ID NO: 527430 - RNA, 32 nt, Human
uggugccuccacucagcucaauuccaguuuuc

SEQ ID NO: 527431 - RNA, 32 nt, Human
uggugccuccagacaugugcacaugaguccau

SEQ ID NO: 527432 - RNA, 32 nt, Human
uggugccuccaggaccgcugcgggugguaacc

SEQ ID NO: 527433 - RNA, 30 nt, Human
uggugccucucguccaugcuccugggcccc

SEQ ID NO: 527434 - RNA, 32 nt, Human
uggugccucucguccaugcuccugggccccag

SEQ ID NO: 527435 - RNA, 32 nt, Human
uggugccucucuccugccgucaucacuauggc

SEQ ID NO: 527436 - RNA, 32 nt, Human
uggugccugagaggcaggcauagaggcuucuc

SEQ ID NO: 527437 - RNA, 32 nt, Human
uggugccugccagcugucuccacuguggaguu

SEQ ID NO: 527438 - RNA, 32 nt, Human
uggugccugccucccacauuugcccuuggucu

SEQ ID NO: 527439 - RNA, 23 nt, Human
uggugccugccuguaauccagcu

SEQ ID NO: 527440 - RNA, 32 nt, Human
uggugccugccuguaauccagcuacucaggag

SEQ ID NO: 527441 - RNA, 21 nt, Human
uggugccugccuguaguccca

SEQ ID NO: 527442 - RNA, 32 nt, Human
uggugccugcuguccgugucagcuuuuaucau

SEQ ID NO: 527443 - RNA, 32 nt, Human
uggugccugcuuguaauuccagcuacuuggga

SEQ ID NO: 527444 - RNA, 32 nt, Human
uggugccuggcucaauguaaguucucaauaug

SEQ ID NO: 527445 - RNA, 32 nt, Human
uggugccuguaaucccagcaguuugggaggcu

SEQ ID NO: 527446 - RNA, 32 nt, Human
uggugccuguaaucccagcuacucgggaggcu

SEQ ID NO: 527447 - RNA, 32 nt, Human
uggugccuguagucccagcuacucaggaggcu

SEQ ID NO: 527448 - RNA, 32 nt, Human
uggugccuguagucccagcuaucugggaggcu

SEQ ID NO: 527449 - RNA, 32 nt, Human
uggugccuuagugacccacaucugcaguggga

SEQ ID NO: 527450 - RNA, 32 nt, Human
uggugccuuccaccccuccaacuaugcccucc

SEQ ID NO: 527451 - RNA, 25 nt, Human
uggugccuucucaaggcaguguucc

SEQ ID NO: 527452 - RNA, 32 nt, Human
uggugccuugggaaacagucugacuugaaccc

SEQ ID NO: 527453 - RNA, 32 nt, Human
uggugccuugggccccuuagccccagcgccag

SEQ ID NO: 527454 - RNA, 26 nt, Human
uggugccuuuugcagccagcgcccac

SEQ ID NO: 527455 - RNA, 32 nt, Human
uggugcgacccaacuucauuuguuuacuugaa

SEQ ID NO: 527456 - RNA, 23 nt, Human
uggugcgaccucggcucacugca

SEQ ID NO: 527457 - RNA, 23 nt, Human
uggugcgaccucggcuuacugca

SEQ ID NO: 527458 - RNA, 23 nt, Human
uggugcgaccuuggcucacugca

SEQ ID NO: 527459 - RNA, 32 nt, Human
uggugcgagccuguaauuccagcuacuuggag

SEQ ID NO: 527460 - RNA, 32 nt, Human
uggugcgaggggcaucugggcguuugacaggu

SEQ ID NO: 527461 - RNA, 32 nt, Human
uggugcgaucauagcccacugcagccuccaac

SEQ ID NO: 527462 - RNA, 32 nt, Human
uggugcgaucauggcucacugcagccucgaac

SEQ ID NO: 527463 - RNA, 32 nt, Human
uggugcgaucauggcucacugcagccuugaac

SEQ ID NO: 527464 - RNA, 23 nt, Human
uggugcgaucucagcucaccgca

SEQ ID NO: 527465 - RNA, 23 nt, Human
uggugcgaucucagcucacugca

SEQ ID NO: 527466 - RNA, 24 nt, Human
uggugcgaucucagcucacugcag

SEQ ID NO: 527467 - RNA, 23 nt, Human
uggugcgaucucagcucccugca

SEQ ID NO: 527468 - RNA, 23 nt, Human
uggugcgaucucgacucacugca

SEQ ID NO: 527469 - RNA, 23 nt, Human
uggugcgaucucggcucacagca

SEQ ID NO: 527470 - RNA, 23 nt, Human
uggugcgaucucggcucacugca

SEQ ID NO: 527471 - RNA, 23 nt, Human
uggugcgaucucggcucucugca

SEQ ID NO: 527472 - RNA, 23 nt, Human
uggugcgaucuuagcucacugca

SEQ ID NO: 527473 - RNA, 23 nt, Human
uggugcgaucuugacucacagca

SEQ ID NO: 527474 - RNA, 23 nt, Human
uggugcgaucuugacucacugca

SEQ ID NO: 527475 - RNA, 23 nt, Human
uggugcgaucuuggcucacugca

SEQ ID NO: 527476 - RNA, 32 nt, Human
uggugcgggagcuacggggcccagggauugug

SEQ ID NO: 527477 - RNA, 32 nt, Human
uggugcgggagggaagaccucucacuuagggc

SEQ ID NO: 527478 - RNA, 32 nt, Human
uggugcggggcccugggcuggggcugucccac

SEQ ID NO: 527479 - RNA, 32 nt, Human
uggugcggucacagcucacugccuccugggcu

SEQ ID NO: 527480 - RNA, 32 nt, Human
uggugcgugccuguaaucccaacuacuuggga

SEQ ID NO: 527481 - RNA, 32 nt, Human
uggugcgugccuguaaucccagcuacucagga

SEQ ID NO: 527482 - RNA, 32 nt, Human
uggugcgugccuguaaucccagcuacucggga

SEQ ID NO: 527483 - RNA, 32 nt, Human
uggugcgugccuguaaucccagcuacucgggg

SEQ ID NO: 527484 - RNA, 32 nt, Human
uggugcgugccuguagucccagcuacucaggg

SEQ ID NO: 527485 - RNA, 32 nt, Human
uggugcgugccuguagucccagcuacucggga

SEQ ID NO: 527486 - RNA, 32 nt, Human
uggugcgugccuguagucccagcuacuuagga

SEQ ID NO: 527487 - RNA, 32 nt, Human
uggugcgugccuguagucccagcuacuuggga

SEQ ID NO: 527488 - RNA, 32 nt, Human
uggugcgugccuguagucucagcuacucagga

SEQ ID NO: 527489 - RNA, 32 nt, Human
uggugcgugccuguagugccagcuacucagga

SEQ ID NO: 527490 - RNA, 32 nt, Human
uggugcgugccuguaguuccagcuaccuggga

SEQ ID NO: 527491 - RNA, 32 nt, Human
uggugcgugccuguaguuccagcuacuuggga

SEQ ID NO: 527492 - RNA, 32 nt, Human
uggugcguggagguggagccugcggcuggagu

SEQ ID NO: 527493 - RNA, 32 nt, Human
uggugcuaacaucccaugccgcucccuccuca

SEQ ID NO: 527494 - RNA, 32 nt, Human
uggugcuauugugaauggaaagguucuaccca

SEQ ID NO: 527495 - RNA, 32 nt, Human
uggugcucaagucacucagaaugagaguccug

SEQ ID NO: 527496 - RNA, 32 nt, Human
uggugcucaccuccucucacugcuagaauauu

SEQ ID NO: 527497 - RNA, 32 nt, Human
uggugcucacugggaccccauaugucugcgua

SEQ ID NO: 527498 - RNA, 32 nt, Human
uggugcucaggggaccacagcugcaaugacag

SEQ ID NO: 527499 - RNA, 32 nt, Human
uggugcuccuagaggguggcccagaggagcug

SEQ ID NO: 527500 - RNA, 32 nt, Human
uggugcucgccuguaaucccagcuacuuggga

SEQ ID NO: 527501 - RNA, 32 nt, Human
uggugcucuaauagccuguugguuugaaugau

SEQ ID NO: 527502 - RNA, 32 nt, Human
uggugcucucuucuccccacugugcccguccg

SEQ ID NO: 527503 - RNA, 32 nt, Human
uggugcucuggccccucucguggagcuacugc

SEQ ID NO: 527504 - RNA, 32 nt, Human
uggugcucugucucccugggugacacccaccc

SEQ ID NO: 527505 - RNA, 32 nt, Human
uggugcucuugccgccccuuccuggguacaga

SEQ ID NO: 527506 - RNA, 32 nt, Human
uggugcugacaucaguggcuccuuguuugaug

SEQ ID NO: 527507 - RNA, 32 nt, Human
uggugcugauggagggagggggaagucgaagg

SEQ ID NO: 527508 - RNA, 32 nt, Human
uggugcugcaagaaaauggauaugguguugag

SEQ ID NO: 527509 - RNA, 32 nt, Human
uggugcugcaccacggggaccugcucucccug

SEQ ID NO: 527510 - RNA, 32 nt, Human
uggugcugcagauccagugggguccggacacu

SEQ ID NO: 527511 - RNA, 31 nt, Human
uggugcugccucuggcuuugucuuuccucag

SEQ ID NO: 527512 - RNA, 32 nt, Human
uggugcugcgaauccugccugcucugauccuc

SEQ ID NO: 527513 - RNA, 32 nt, Human
uggugcugcuacucgggaggaagcagagcagc

SEQ ID NO: 527514 - RNA, 32 nt, Human
uggugcugcucaccgucuuccuccuccugguc

SEQ ID NO: 527515 - RNA, 32 nt, Human
uggugcugcuguucuuuuuaauuucuuccuuu

SEQ ID NO: 527516 - RNA, 32 nt, Human
uggugcugcuucuguauauuuccacagcaucc

SEQ ID NO: 527517 - RNA, 32 nt, Human
uggugcuggagguggcugcagagagccacuug

SEQ ID NO: 527518 - RNA, 20 nt, Human
uggugcuggaucugggucau

SEQ ID NO: 527519 - RNA, 32 nt, Human
uggugcuggcgcugcacugggcugacugcggc

SEQ ID NO: 527520 - RNA, 32 nt, Human
uggugcuggcugcuguugggagcuccacugga

SEQ ID NO: 527521 - RNA, 32 nt, Human
uggugcugggccugagccagggggccgggaca

SEQ ID NO: 527522 - RNA, 32 nt, Human
uggugcugggcugugcccggcggcagcagcaa

SEQ ID NO: 527523 - RNA, 32 nt, Human
uggugcugggcuguugggagccgaaggcccau

SEQ ID NO: 527524 - RNA, 32 nt, Human
uggugcugggggaggcucccagcuacaccuug

SEQ ID NO: 527525 - RNA, 32 nt, Human
uggugcuggugacuuucuguuccuuuuggagu

SEQ ID NO: 527526 - RNA, 32 nt, Human
uggugcuggugcugcacugggcugacugcggc

SEQ ID NO: 527527 - RNA, 32 nt, Human
uggugcuguaagucuccuccuuccgagucugu

SEQ ID NO: 527528 - RNA, 32 nt, Human
uggugcuguguaugccucuggauguguccaga

SEQ ID NO: 527529 - RNA, 32 nt, Human
uggugcugugugccccacuccagccuggggac

SEQ ID NO: 527530 - RNA, 32 nt, Human
uggugcugugugugagcgagugacagaaggcc

SEQ ID NO: 527531 - RNA, 32 nt, Human
uggugcuguucccuccgcccugugccagggcc

SEQ ID NO: 527532 - RNA, 32 nt, Human
uggugcuguuucaaccuccguccccacaggag

SEQ ID NO: 527533 - RNA, 32 nt, Human
uggugcuucuccccacaccccuguaggccuca

SEQ ID NO: 527534 - RNA, 32 nt, Human
uggugcuucucucccaggcuguccucgggacc

SEQ ID NO: 527535 - RNA, 32 nt, Human
uggugcuucugccuuuaguuuuaggacacauu

SEQ ID NO: 527536 - RNA, 32 nt, Human
uggugcuucuguccuaggccaccacuccucca

SEQ ID NO: 527537 - RNA, 32 nt, Human
uggugcuugauuuccagaaacucuccagcgac

SEQ ID NO: 527538 - RNA, 32 nt, Human
uggugcuuggacgaccugcucucuacauugcu

SEQ ID NO: 527539 - RNA, 32 nt, Human
uggugcuugugagcauuugcuccaggauccgc

SEQ ID NO: 527540 - RNA, 32 nt, Human
uggugcuuucaugucugaaaauuuuccucuuc

SEQ ID NO: 527541 - RNA, 32 nt, Human
uggugcuuuccuucaucucccacgaacucaag

SEQ ID NO: 527542 - RNA, 23 nt, Human
uggugcuuuucacuuguguuuua

SEQ ID NO: 527543 - RNA, 32 nt, Human
uggugcuuuuguaccuagguuuuaugugauuu

SEQ ID NO: 527544 - RNA, 21 nt, Human
ugucacccagggugagugcaa

SEQ ID NO: 527545 - RNA, 24 nt, Human
ugucacccaggguggaauacagug

SEQ ID NO: 527546 - RNA, 32 nt, Human
ugucacccagguggcuggaguacaguggccug

SEQ ID NO: 527547 - RNA, 24 nt, Human
ugucacccagguuagaguguagug

SEQ ID NO: 527548 - RNA, 24 nt, Human
ugucacccagguucgaguucagug

SEQ ID NO: 527549 - RNA, 23 nt, Human
ugucacccagguuggagugcagu

SEQ ID NO: 527550 - RNA, 24 nt, Human
ugucacccagguuggagugcagug

SEQ ID NO: 527551 - RNA, 23 nt, Human
ugucacccagucuggagugcagu

SEQ ID NO: 527552 - RNA, 24 nt, Human
ugucacccagucuggagugcagug

SEQ ID NO: 527553 - RNA, 23 nt, Human
ugucacccaguuuggagugcagu

SEQ ID NO: 527554 - RNA, 24 nt, Human
ugucacccaguuuggagugcagug

SEQ ID NO: 527555 - RNA, 23 nt, Human
ugucacccauccuagagugcagu

SEQ ID NO: 527556 - RNA, 24 nt, Human
ugucacccauucuggaguacaaug

SEQ ID NO: 527557 - RNA, 32 nt, Human
ugucaccccacaacaggagggguuagcugugc

SEQ ID NO: 527558 - RNA, 32 nt, Human
ugucaccccugcacuccugccuucccgugggc

SEQ ID NO: 527559 - RNA, 24 nt, Human
ugucaccccugcugcuggagugca

SEQ ID NO: 527560 - RNA, 32 nt, Human
ugucaccccugcugcuggagugcaauugcaca

SEQ ID NO: 527561 - RNA, 32 nt, Human
ugucacccgagacaguaagagccaccccuccu

SEQ ID NO: 527562 - RNA, 23 nt, Human
ugucacccgagcuggagugcagu

SEQ ID NO: 527563 - RNA, 24 nt, Human
ugucacccgagcuggagugcagug

SEQ ID NO: 527564 - RNA, 23 nt, Human
ugucacccgggcuggagugcagu

SEQ ID NO: 527565 - RNA, 24 nt, Human
ugucacccgggcuggagugcagug

SEQ ID NO: 527566 - RNA, 21 nt, Human
ugucacccgggcuggagugua

SEQ ID NO: 527567 - RNA, 22 nt, Human
ugucacccgggcuggaguguaa

SEQ ID NO: 527568 - RNA, 32 nt, Human
ugucacccucacuuucacugcugguauugauu

SEQ ID NO: 527569 - RNA, 32 nt, Human
ugucacccuccagugacccgcagccaggaggu

SEQ ID NO: 527570 - RNA, 32 nt, Human
ugucacccugcccagaaaggccagcagcuugg

SEQ ID NO: 527571 - RNA, 23 nt, Human
ugucacccuggcuggagugcagu

SEQ ID NO: 527572 - RNA, 24 nt, Human
ugucaccgaggcuagaguacagug

SEQ ID NO: 527573 - RNA, 24 nt, Human
ugucaccgaggcuggagugcaaug

SEQ ID NO: 527574 - RNA, 23 nt, Human
ugucaccgaggcuggagugcagu

SEQ ID NO: 527575 - RNA, 24 nt, Human
ugucaccgaggcuggagugcagug

SEQ ID NO: 527576 - RNA, 24 nt, Human
ugucaccuaagcuggaguacagug

SEQ ID NO: 527577 - RNA, 32 nt, Human
ugucaccuaagcuggagugcagugcgcgaucu

SEQ ID NO: 527578 - RNA, 32 nt, Human
ugucaccuagacuagacuggagugcaauggcc

SEQ ID NO: 527579 - RNA, 24 nt, Human
ugucaccuagacuggagugcaaug

SEQ ID NO: 527580 - RNA, 24 nt, Human
ugucaccuaggcaagagugcaaug

SEQ ID NO: 527581 - RNA, 24 nt, Human
ugucaccuaggcuagagggcagug

SEQ ID NO: 527582 - RNA, 24 nt, Human
ugucaccuaggcugcagugcagug

SEQ ID NO: 527583 - RNA, 23 nt, Human
ugucaccuaggcuggaaugcagu

SEQ ID NO: 527584 - RNA, 24 nt, Human
ugucaccuaggcuggaaugcagug

SEQ ID NO: 527585 - RNA, 23 nt, Human
ugucaccuaggcuggagugcagu

SEQ ID NO: 527586 - RNA, 24 nt, Human
ugucaccuaggcuggagugcagug

SEQ ID NO: 527587 - RNA, 23 nt, Human
ugucaccuaggcuggauugcaau

SEQ ID NO: 527588 - RNA, 24 nt, Human
ugucaccuaggcuggauugcaaug

SEQ ID NO: 527589 - RNA, 32 nt, Human
ugucaccuagguccucuuugagccacauccgg

SEQ ID NO: 527590 - RNA, 24 nt, Human
ugucaccuagguuggagugcagug

SEQ ID NO: 527591 - RNA, 32 nt, Human
ugucaccucacagcaggagacagggaaacuga

SEQ ID NO: 527592 - RNA, 32 nt, Human
ugucaccuccugggcaggguucugggacccuc

SEQ ID NO: 527593 - RNA, 32 nt, Human
ugucaccugacuugaggagcuguuuuguuguu

SEQ ID NO: 527594 - RNA, 32 nt, Human
ugucaccugagccuguucuuucuguccuggug

SEQ ID NO: 527595 - RNA, 32 nt, Human
ugucaccugagggcuggcaggaaggggcgaga

SEQ ID NO: 527596 - RNA, 32 nt, Human
ugucaccugagucuaacagcaguuugacuuug

SEQ ID NO: 527597 - RNA, 32 nt, Human
ugucaccugcagcagagguggagugggggcca

SEQ ID NO: 527598 - RNA, 32 nt, Human
ugucaccugccugcccaggcagcuguuugcag

SEQ ID NO: 527599 - RNA, 32 nt, Human
ugucaccugccuggcuccugcucucugaugua

SEQ ID NO: 527600 - RNA, 32 nt, Human
ugucaccugcugcaacgcuguagccaaugaag

SEQ ID NO: 527601 - RNA, 32 nt, Human
ugucaccugggccuacacaggucccgagccaa

SEQ ID NO: 527602 - RNA, 24 nt, Human
ugucaccugggcuggaguccagug

SEQ ID NO: 527603 - RNA, 21 nt, Human
ugucaccugguugaagugcag

SEQ ID NO: 527604 - RNA, 32 nt, Human
ugucaccugugcacaucuugcugguggaggca

SEQ ID NO: 527605 - RNA, 32 nt, Human
ugucaccuuccaccccacaaggccaaccuuuu

SEQ ID NO: 527606 - RNA, 32 nt, Human
ugucaccuuccaugugcacuugcccaugggag

SEQ ID NO: 527607 - RNA, 32 nt, Human
ugucaccuugcuuccuaucugccucuuucgug

SEQ ID NO: 527608 - RNA, 32 nt, Human
ugucaccuuucuucuugugucuccuuauggua

SEQ ID NO: 527609 - RNA, 32 nt, Human
ugucaccuuugauuuauugauuuacuugagau

SEQ ID NO: 527610 - RNA, 32 nt, Human
ugucacgaacagggacagcaacaccgacacca

SEQ ID NO: 527611 - RNA, 32 nt, Human
ugucacgaccugcauggagacgccgcauggaa

SEQ ID NO: 527612 - RNA, 32 nt, Human
ugucacgacuaaccuucugucucugaaauugu

SEQ ID NO: 527613 - RNA, 32 nt, Human
ugucacgaugcccagacuuggagcaaggcaac

SEQ ID NO: 527614 - RNA, 24 nt, Human
ugucacgcaggcuagagugcagug

SEQ ID NO: 527615 - RNA, 32 nt, Human
ugucacgccuguaaucccaguacuuugggagg

SEQ ID NO: 527616 - RNA, 32 nt, Human
ugucacgcgccuguaaucccagcuacuugggg

SEQ ID NO: 527617 - RNA, 32 nt, Human
ugucacgcugauugucuguuuuuauagcaaaa

SEQ ID NO: 527618 - RNA, 32 nt, Human
ugucacgucaccuuuccaccuuccccgacccc

SEQ ID NO: 527619 - RNA, 32 nt, Human
ugucacgugcaggaacagugaggcagggacag

SEQ ID NO: 527620 - RNA, 22 nt, Human
ugucacguucuggaacauucug

SEQ ID NO: 527621 - RNA, 32 nt, Human
ugucacuaagcagcacgugacacuggcaggac

SEQ ID NO: 527622 - RNA, 32 nt, Human
ugucacuacaauauuacauucugcaaauguua

SEQ ID NO: 527623 - RNA, 32 nt, Human
ugucacuacacuccaggcugggugacagauua

SEQ ID NO: 527624 - RNA, 32 nt, Human
ugucacuacuaaaauuacaaaaauuagcaggg

SEQ ID NO: 527625 - RNA, 32 nt, Human
ugucacuagcagcugcagucaacaguucaaag

SEQ ID NO: 527626 - RNA, 32 nt, Human
ugucacuaggcaauucugucauuguguaaaca

SEQ ID NO: 527627 - RNA, 32 nt, Human
ugucacuagggcagggacaggauaagagggau

SEQ ID NO: 527628 - RNA, 32 nt, Human
ugucacuauguggcugucacgugaagugcugg

SEQ ID NO: 527629 - RNA, 32 nt, Human
ugucacucaacggucucggucuugucaucuuu

SEQ ID NO: 527630 - RNA, 24 nt, Human
ugucacucaaucuggaaugcagug

SEQ ID NO: 527631 - RNA, 23 nt, Human
ugucacucaggcuagagugcagu

SEQ ID NO: 527632 - RNA, 24 nt, Human
ugucacucaggcuagagugcagug

SEQ ID NO: 527633 - RNA, 24 nt, Human
ugucacucaggcugcagugcagug

SEQ ID NO: 527634 - RNA, 23 nt, Human
ugucacucaggcuggaaugcagu

SEQ ID NO: 527635 - RNA, 24 nt, Human
ugucacucaggcuggaaugcagug

SEQ ID NO: 527636 - RNA, 23 nt, Human
ugucacucaggcuggaguacagu

SEQ ID NO: 527637 - RNA, 24 nt, Human
ugucacucaggcuggaguacagug

SEQ ID NO: 527638 - RNA, 23 nt, Human
ugucacucaggcuggagugcaau

SEQ ID NO: 527639 - RNA, 24 nt, Human
ugucacucaggcuggagugcaaug

SEQ ID NO: 527640 - RNA, 23 nt, Human
ugucacucaggcuggagugcagu

SEQ ID NO: 527641 - RNA, 24 nt, Human
ugucacucaggcuggagugcagug

SEQ ID NO: 527642 - RNA, 24 nt, Human
ugucacucaggcuggagugcggug

SEQ ID NO: 527643 - RNA, 32 nt, Human
ugucacucauuucugaaaguuucuucagccac

SEQ ID NO: 527644 - RNA, 32 nt, Human
ugucacuccagccugggcaacagagugagacu

SEQ ID NO: 527645 - RNA, 23 nt, Human
ugucacuccucuuucccuuggua

SEQ ID NO: 527646 - RNA, 32 nt, Human
ugucacucuaagagcauccaagcccuggcccg

SEQ ID NO: 527647 - RNA, 32 nt, Human
ugucacucucaacacacacagcuccuuucacu

SEQ ID NO: 527648 - RNA, 32 nt, Human
ugucacucuguuuguuaggagaugucugcuuu

SEQ ID NO: 527649 - RNA, 23 nt, Human
ugucacugaggcuggagugcagu

SEQ ID NO: 527650 - RNA, 24 nt, Human
ugucacugaggcuggagugcagug

SEQ ID NO: 527651 - RNA, 32 nt, Human
ugucacugagucuacauguaucugaaacuagc

SEQ ID NO: 527652 - RNA, 32 nt, Human
ugucacugagugaaaucucuguuuucuauuuu

SEQ ID NO: 527653 - RNA, 32 nt, Human
ugucacugauugcauuccagccugggugacag

SEQ ID NO: 527654 - RNA, 32 nt, Human
ugucacugcacuccagccggggcaacagagca

SEQ ID NO: 527655 - RNA, 32 nt, Human
ugucacugcacuccagccuggcgacagaguga

SEQ ID NO: 527656 - RNA, 32 nt, Human
ugucacugcacuccagccugggcaacagguaa

SEQ ID NO: 527657 - RNA, 32 nt, Human
ugucacugcacuccagccugggcgacagaggg

SEQ ID NO: 527658 - RNA, 32 nt, Human
ugucacugcacuccagccugggcgacagagug

SEQ ID NO: 527659 - RNA, 32 nt, Human
ugucacugcacuccagccugggugacaagagu

SEQ ID NO: 527660 - RNA, 32 nt, Human
ugucacugcacuccagccugggugacagagug

SEQ ID NO: 527661 - RNA, 32 nt, Human
ugucacugcacuccagccugggugacagugag

SEQ ID NO: 527662 - RNA, 32 nt, Human
ugucacugcacuccagccuggugacagaguga

SEQ ID NO: 527663 - RNA, 32 nt, Human
ugucacugcacuccagcuugggugacagagac

SEQ ID NO: 527664 - RNA, 32 nt, Human
ugucacugcacuccauccugggugacaagagc

SEQ ID NO: 527665 - RNA, 32 nt, Human
ugucacugcagaagucuuccacaggccuucgc

SEQ ID NO: 527666 - RNA, 32 nt, Human
ugucacugccaaacaguaaccuccaggagaaa

SEQ ID NO: 527667 - RNA, 32 nt, Human
ugucacugcccucuccccaaccucuccucuaa

SEQ ID NO: 527668 - RNA, 32 nt, Human
ugucacugcccucucccugccugggggcuaug

SEQ ID NO: 527669 - RNA, 32 nt, Human
ugucacugcugcacucacucugcaagggauca

SEQ ID NO: 527670 - RNA, 32 nt, Human
ugucacugggcaagguggcucacaccuauaau

SEQ ID NO: 527671 - RNA, 32 nt, Human
ugucacuguacuccagccugggcaacagagug

SEQ ID NO: 527672 - RNA, 32 nt, Human
ugucacugucgcugcugccucuguccagcuga

SEQ ID NO: 527673 - RNA, 32 nt, Human
ugucacugucuuggccuugagaagagagcccg

SEQ ID NO: 527674 - RNA, 32 nt, Human
ugucacuguggaagcuugagcauguugcuuga

SEQ ID NO: 527675 - RNA, 32 nt, Human
ugucacuguggacgccaaaauggcauaacuga

SEQ ID NO: 527676 - RNA, 32 nt, Human
ugucacugugugacccucagcaagucacuaac

SEQ ID NO: 527677 - RNA, 32 nt, Human
ugucacuuaaguuuggagugcaguggcaugau

SEQ ID NO: 527678 - RNA, 32 nt, Human
ugucacuuaguucugugguuccagcagaucuc

SEQ ID NO: 527679 - RNA, 32 nt, Human
ugucacuucacacccauggcuaacccuggagg

SEQ ID NO: 527680 - RNA, 32 nt, Human
ugucacuucauacuugcaggauugcacagcag

SEQ ID NO: 527681 - RNA, 32 nt, Human
ugucacuugauuccauucucuccaucccuucc

SEQ ID NO: 527682 - RNA, 32 nt, Human
ugucacuuguagguuucucugccuccagguug

SEQ ID NO: 527683 - RNA, 32 nt, Human
ugucacuuucagcccgggacugcccagaugac

SEQ ID NO: 527684 - RNA, 32 nt, Human
ugucacuuuugcucucacuguuauguugaaua

SEQ ID NO: 527685 - RNA, 25 nt, Human
ugucagaaacgaugcugucuuccau

SEQ ID NO: 527686 - RNA, 32 nt, Human
ugucagaaagaggggaaggaagccagguugau

SEQ ID NO: 527687 - RNA, 32 nt, Human
ugucagaaccucuaaucuuaccucugggccag

SEQ ID NO: 527688 - RNA, 32 nt, Human
ugucagaaggggguuguggcaaaagccacauu

SEQ ID NO: 527689 - RNA, 32 nt, Human
ugucagaaugggcucaaggagccaucuuuugu

SEQ ID NO: 527690 - RNA, 22 nt, Human
ugucagaaugugaaaaguucug

SEQ ID NO: 527691 - RNA, 20 nt, Human
ugucagacaguuaguguagg

SEQ ID NO: 527692 - RNA, 20 nt, Human
ugucagacuauaggugugga

SEQ ID NO: 527693 - RNA, 32 nt, Human
ugucagaggcagcauggggcgccagugguccu

SEQ ID NO: 527694 - RNA, 32 nt, Human
ugucagagguagagaagacagggauugggaag

SEQ ID NO: 527695 - RNA, 32 nt, Human
ugucagagguggggcucagcaggaagugggac

SEQ ID NO: 527696 - RNA, 32 nt, Human
ugucagaucuccagguucuggagguuggaggu

SEQ ID NO: 527697 - RNA, 32 nt, Human
ugucagaucuguggcuucaggcaggaggaaag

SEQ ID NO: 527698 - RNA, 32 nt, Human
ugucagaugccuguagucccagcuacuuguga

SEQ ID NO: 527699 - RNA, 32 nt, Human
ugucagauguaaaggcacagcuggagcagagg

SEQ ID NO: 527700 - RNA, 20 nt, Human
ugucagauuuaugauaggaa

SEQ ID NO: 527701 - RNA, 32 nt, Human
ugucagauuugugucacucuucugccuucgug

SEQ ID NO: 527702 - RNA, 28 nt, Human
ugucagcaaacaguguggaaaaugccuu

SEQ ID NO: 527703 - RNA, 32 nt, Human
ugucagcaagcacaucagacucuagccuggac

SEQ ID NO: 527704 - RNA, 25 nt, Human
ugucagcacuggagucuucuugcug

SEQ ID NO: 527705 - RNA, 32 nt, Human
ugucagcacuuuuuccaaaaggcucacgaagu

SEQ ID NO: 527706 - RNA, 32 nt, Human
ugucagcagcacugagugccuaggugagccac

SEQ ID NO: 527707 - RNA, 32 nt, Human
ugucagcagccuggccuggucugugccugccc

SEQ ID NO: 527708 - RNA, 32 nt, Human
ugucagcagcuuuucauucagcugaaugcucu

SEQ ID NO: 527709 - RNA, 32 nt, Human
ugucagcaggcaggcuggggaggccaguguug

SEQ ID NO: 527710 - RNA, 32 nt, Human
ugucagcaguuggcccgggagacucuggagga

SEQ ID NO: 527711 - RNA, 21 nt, Human
ugucagcauaaugauagugaa

SEQ ID NO: 527712 - RNA, 32 nt, Human
ugucagcaucuucucacucccuucuccuugau

SEQ ID NO: 527713 - RNA, 32 nt, Human
ugucagccacccaggcccaacauguugugagu

SEQ ID NO: 527714 - RNA, 32 nt, Human
ugucagccaccgcacccagccuggaguggccu

SEQ ID NO: 527715 - RNA, 32 nt, Human
ugucagccaccucccucugccagucgggagag

SEQ ID NO: 527716 - RNA, 32 nt, Human
ugucagccacugcggccuuagagagagcugca

SEQ ID NO: 527717 - RNA, 32 nt, Human
ugucagccacugugauagaggcugaggaaucc

SEQ ID NO: 527718 - RNA, 24 nt, Human
ugucagccaggcuggagugcaaug

SEQ ID NO: 527719 - RNA, 24 nt, Human
ugucagccaggcuggagugcagug

SEQ ID NO: 527720 - RNA, 32 nt, Human
ugucagcccccacuccaggaaggcagcccaau

SEQ ID NO: 527721 - RNA, 32 nt, Human
ugucagccccuccuggugcuggugcccugaug

SEQ ID NO: 527722 - RNA, 32 nt, Human
ugucagccccuggccuagggggaagaagaauc

SEQ ID NO: 527723 - RNA, 32 nt, Human
ugucagccccuuccuuucccccgaccuaaaca

SEQ ID NO: 527724 - RNA, 19 nt, Human
ugucagcccuugaacaucu

SEQ ID NO: 527725 - RNA, 32 nt, Human
ugucagcccuugaacaucuccuccaaagagac

SEQ ID NO: 527726 - RNA, 32 nt, Human
ugucagccuaccagcucggagugcaguuccug

SEQ ID NO: 527727 - RNA, 32 nt, Human
ugucagccuggaccugccaagcugccugugca

SEQ ID NO: 527728 - RNA, 32 nt, Human
ugucagccuggagaccagcaccagaggaaucu

SEQ ID NO: 527729 - RNA, 32 nt, Human
ugucagccugggaaccggcccccaaauggaag

SEQ ID NO: 527730 - RNA, 32 nt, Human
ugucagccuuucuccuguuuauggguuucuuc

SEQ ID NO: 527731 - RNA, 32 nt, Human
ugucagcgcagccccagugcugugcuugaagc

SEQ ID NO: 527732 - RNA, 32 nt, Human
ugucagcggcagcugcucggcagcccagcccu

SEQ ID NO: 527733 - RNA, 24 nt, Human
ugucagcuaggcugaaguguagug

SEQ ID NO: 527734 - RNA, 32 nt, Human
ugucagcucacugcaaccuccaccuccuggau

SEQ ID NO: 527735 - RNA, 24 nt, Human
ugucagcucaugcuuacaaccugu

SEQ ID NO: 527736 - RNA, 20 nt, Human
ugucagcuccagauucauca

SEQ ID NO: 527737 - RNA, 32 nt, Human
ugucagcucccugcaaccuccgccuccugggu

SEQ ID NO: 527738 - RNA, 21 nt, Human
ugucagcucuagaggcacccu

SEQ ID NO: 527739 - RNA, 32 nt, Human
ugucagcucucauauucuuccagguuuugcac

SEQ ID NO: 527740 - RNA, 32 nt, Human
ugucagcucucaucugaggcauccagcagucu

SEQ ID NO: 527741 - RNA, 32 nt, Human
ugucagcugcagugggagacagcugcacaagg

SEQ ID NO: 527742 - RNA, 32 nt, Human
ugucagcugcuugugaaacucagccagguugu

SEQ ID NO: 527743 - RNA, 22 nt, Human
ugucagcuuaucuucuuugaua

SEQ ID NO: 527744 - RNA, 32 nt, Human
ugucagcuuuaaauccuucucacuuuccccac

SEQ ID NO: 527745 - RNA, 32 nt, Human
ugucagcuuuggauugcuggggccaggcccca

SEQ ID NO: 527746 - RNA, 32 nt, Human
ugucaggaaagcaugucagagcagagcugcca

SEQ ID NO: 527747 - RNA, 32 nt, Human
ugucaggaaaggaggugcuguuaugagcagcu

SEQ ID NO: 527748 - RNA, 32 nt, Human
ugucaggacaacacauauaaccaccaaggaug

SEQ ID NO: 527749 - RNA, 32 nt, Human
ugucaggacacauggauuuuggcagggcgggg

SEQ ID NO: 527750 - RNA, 32 nt, Human
ugucaggagagcaguggcacgggggcgugagg

SEQ ID NO: 527751 - RNA, 32 nt, Human
ugucaggagagggagagggggcugaggaggua

SEQ ID NO: 527752 - RNA, 32 nt, Human
ugucaggagaggggaaggcagccgcuuucacc

SEQ ID NO: 527753 - RNA, 32 nt, Human
ugucaggagcccaggucuccagcuggagggaa

SEQ ID NO: 527754 - RNA, 32 nt, Human
ugucaggaguugucuucaucugcagcacguuu

SEQ ID NO: 527755 - RNA, 32 nt, Human
ugucaggaugccaagaccaucaggagaggaca

SEQ ID NO: 527756 - RNA, 32 nt, Human
ugucaggcaauggggaaaggagagcucaggug

SEQ ID NO: 527757 - RNA, 32 nt, Human
ugucaggcaggcaucucuggauccagcugguu

SEQ ID NO: 527758 - RNA, 32 nt, Human
ugucaggcaguuuccaucuucucacaaucuuc

SEQ ID NO: 527759 - RNA, 32 nt, Human
ugucaggccaccgagguccaagccgcacuugc

SEQ ID NO: 527760 - RNA, 32 nt, Human
ugucaggccugucagucucaugacaguuuguu

SEQ ID NO: 527761 - RNA, 32 nt, Human
ugucaggccuugcccuucccaccagcaugucc

SEQ ID NO: 527762 - RNA, 32 nt, Human
ugucaggcggagagacccgccgccaggaauga

SEQ ID NO: 527763 - RNA, 32 nt, Human
ugucaggcucaaaccacuucucaggcaguuua

SEQ ID NO: 527764 - RNA, 32 nt, Human
ugucaggcucacugcccuuauuucucugccca

SEQ ID NO: 527765 - RNA, 32 nt, Human
ugucaggcucuccaccaaggagggacugggcc

SEQ ID NO: 527766 - RNA, 32 nt, Human
ugucaggcucugggcggagggcagcagccccu

SEQ ID NO: 527767 - RNA, 22 nt, Human
ugucaggcugcccacagcaaca

SEQ ID NO: 527768 - RNA, 32 nt, Human
ugucaggcugggguuagugagcagguuacacu

SEQ ID NO: 527769 - RNA, 32 nt, Human
ugucaggcuugcuuugccuugugggcuacuca

SEQ ID NO: 527770 - RNA, 32 nt, Human
ugucagggaaugacacucaucccccuucccaa

SEQ ID NO: 527771 - RNA, 32 nt, Human
ugucagggaguguucccuauccaaucaaucuu

SEQ ID NO: 527772 - RNA, 32 nt, Human
ugucagggcagagacgcccaaggcacugaacu

SEQ ID NO: 527773 - RNA, 22 nt, Human
ugucagggcagccagcuguaga

SEQ ID NO: 527774 - RNA, 30 nt, Human
ugucagggccucuccucacugcuguuguca

SEQ ID NO: 527775 - RNA, 32 nt, Human
ugucaggggcccuguccucaaccccgggucug

SEQ ID NO: 527776 - RNA, 32 nt, Human
ugucaggggcccuguccucaacccugggucug

SEQ ID NO: 527777 - RNA, 32 nt, Human
ugucagggucucaaacugccuaacacuuugua

SEQ ID NO: 527778 - RNA, 32 nt, Human
ugucagggugaggggugcaggagcgcagaggc

SEQ ID NO: 527779 - RNA, 32 nt, Human
ugucagguaaagccagaauaagagauaaaagg

SEQ ID NO: 527780 - RNA, 32 nt, Human
ugucaggucaccagauaaaggcaagucuuguc

SEQ ID NO: 527781 - RNA, 32 nt, Human
ugucaggugacagacagcuuggucacaacaca

SEQ ID NO: 527782 - RNA, 32 nt, Human
ugucaguaaacaggaaggaaggaggccaucug

SEQ ID NO: 527783 - RNA, 32 nt, Human
ugucaguaaagaaagagaaaauugcaucuugu

SEQ ID NO: 527784 - RNA, 32 nt, Human
ugucaguaacuuccauugauuaggcagacaua

SEQ ID NO: 527785 - RNA, 32 nt, Human
ugucaguacugcacugcaagaauggcagauuu

SEQ ID NO: 527786 - RNA, 23 nt, Human
ugucagucacaggagaacagcug

SEQ ID NO: 527787 - RNA, 32 nt, Human
ugucagucagggacaacaagauccuuaaugca

SEQ ID NO: 527788 - RNA, 32 nt, Human
ugucagucccaccuugaagacagaguuccagg

SEQ ID NO: 527789 - RNA, 32 nt, Human
ugucagucucagaaguuucaugcugagauaac

SEQ ID NO: 527790 - RNA, 32 nt, Human
ugucagucuccuccucugcguccucggccgcg

SEQ ID NO: 527791 - RNA, 26 nt, Human
ugucagugaacaaauaauaaugccuu

SEQ ID NO: 527792 - RNA, 20 nt, Human
ugucagugaagcugaugccu

SEQ ID NO: 527793 - RNA, 32 nt, Human
ugucagugagggugggguggaggacuccuaaa

SEQ ID NO: 527794 - RNA, 32 nt, Human
ugucagugagguugcaguuggucugggcuguu

SEQ ID NO: 527795 - RNA, 32 nt, Human
ugucagugauugaagggacacacuacuacuug

SEQ ID NO: 527796 - RNA, 32 nt, Human
ugucagugcauuugaggagacagcccccucuu

SEQ ID NO: 527797 - RNA, 32 nt, Human
ugucagugcuugugggaugcaguggucuucag

SEQ ID NO: 527798 - RNA, 32 nt, Human
ugucaguggaaaugccugccccagagggauau

SEQ ID NO: 527799 - RNA, 32 nt, Human
ugucaguggaggggucucugcagccaacugag

SEQ ID NO: 527800 - RNA, 29 nt, Human
ugucagugucugugucugugugugccugu

SEQ ID NO: 527801 - RNA, 29 nt, Human
ugucagugucuguguguugauggguggcc

SEQ ID NO: 527802 - RNA, 32 nt, Human
ugucaguucaccucuucugucguugucagagg

SEQ ID NO: 527803 - RNA, 32 nt, Human
ugucaguucaguuguugcucacugugguaauu

SEQ ID NO: 527804 - RNA, 32 nt, Human
ugucaguugccucauagccugcugguccugua

SEQ ID NO: 527805 - RNA, 20 nt, Human
ugucaguugcugcccuucac

SEQ ID NO: 527806 - RNA, 32 nt, Human
ugucaguuuacaccaauaguuucuuguuaauc

SEQ ID NO: 527807 - RNA, 32 nt, Human
ugucauaaaaggauucacacuggagagaaacc

SEQ ID NO: 527808 - RNA, 32 nt, Human
ugucauacacaaauguuccacaaggcgggagu

SEQ ID NO: 527809 - RNA, 32 nt, Human
ugucauacaggcuggcgugcaguagugggauc

SEQ ID NO: 527810 - RNA, 32 nt, Human
ugucauagccuuggaauaauuaagucucauga

SEQ ID NO: 527811 - RNA, 32 nt, Human
ugucauagcugcaggaggugauggcacaaugc

SEQ ID NO: 527812 - RNA, 32 nt, Human
ugucauagucuucucacuccuaauccaugacc

SEQ ID NO: 527813 - RNA, 32 nt, Human
ugucauagugguuuuuauuccugcuuuguuuc

SEQ ID NO: 527814 - RNA, 32 nt, Human
ugucauaguucuugccuucccuaaguuuauau

SEQ ID NO: 527815 - RNA, 32 nt, Human
ugucaucaacagugagcaaaucuggcauggug

SEQ ID NO: 527816 - RNA, 32 nt, Human
ugucaucacaaaaucucucaguaaggcuauau

SEQ ID NO: 527817 - RNA, 32 nt, Human
ugucaucacaugcaugcauaaaccggcaugug

SEQ ID NO: 527818 - RNA, 22 nt, Human
ugucaucaggcuggagugcagu

SEQ ID NO: 527819 - RNA, 23 nt, Human
ugucaucaggcuggagugcagug

SEQ ID NO: 527820 - RNA, 32 nt, Human
ugucaucaguuucugcuacguuucaaagaucc

SEQ ID NO: 527821 - RNA, 32 nt, Human
ugucaucaugccacugcacuuccagccugggu

SEQ ID NO: 527822 - RNA, 32 nt, Human
ugucaucauucagcuccaccuuccccgguccc

SEQ ID NO: 527823 - RNA, 32 nt, Human
ugucaucauugugacuuccugguagcccaaga

SEQ ID NO: 527824 - RNA, 23 nt, Human
ugucauccaaacuggagugcagu

SEQ ID NO: 527825 - RNA, 24 nt, Human
ugucauccaaacuggagugcagug

SEQ ID NO: 527826 - RNA, 32 nt, Human
ugucauccagaagucagagcagagugcgcaau

SEQ ID NO: 527827 - RNA, 32 nt, Human
ugucauccagacuggagcaguggugcaauuau

SEQ ID NO: 527828 - RNA, 32 nt, Human
ugucauccagagcuggagugcagcggcacagu

SEQ ID NO: 527829 - RNA, 23 nt, Human
ugucauccaggcuagagugcagu

SEQ ID NO: 527830 - RNA, 24 nt, Human
ugucauccaggcuagagugcagug

SEQ ID NO: 527831 - RNA, 23 nt, Human
ugucauccaggcuggagugcagu

SEQ ID NO: 527832 - RNA, 24 nt, Human
ugucauccaggcuggagugcagug

SEQ ID NO: 527833 - RNA, 23 nt, Human
ugucauccaggcuggagugcggu

SEQ ID NO: 527834 - RNA, 32 nt, Human
ugucauccaguauuaaguucuuagucauugau

SEQ ID NO: 527835 - RNA, 32 nt, Human
ugucauccgucuucaauauuuuuaaccagaaa

SEQ ID NO: 527836 - RNA, 32 nt, Human
ugucauccuauaggcaaaaagagcaagccagu

SEQ ID NO: 527837 - RNA, 32 nt, Human
ugucaucucagggagcuuaaaaugggcuugau

SEQ ID NO: 527838 - RNA, 32 nt, Human
ugucaucuccaagcugaguuuccucuucugag

SEQ ID NO: 527839 - RNA, 32 nt, Human
ugucaucuccaucuucacccuucagagagcag

SEQ ID NO: 527840 - RNA, 32 nt, Human
ugucaucucuacucuccucugccaugaggcca

SEQ ID NO: 527841 - RNA, 32 nt, Human
ugucaucucuacugggccauaggaccgggcaa

SEQ ID NO: 527842 - RNA, 32 nt, Human
ugucaucugcaaauaauuuuagccagguggca

SEQ ID NO: 527843 - RNA, 32 nt, Human
ugucaucugcuucuccccuguuggggcuaagg

SEQ ID NO: 527844 - RNA, 32 nt, Human
ugucaucuggcgcugaaagcaccaggacuggg

SEQ ID NO: 527845 - RNA, 32 nt, Human
ugucaucuggguagggcagagaggagggcuug

SEQ ID NO: 527846 - RNA, 32 nt, Human
ugucaucugucacccaggcuggagugcaguag

SEQ ID NO: 527847 - RNA, 32 nt, Human
ugucaucuguuaggaagccauucuaaagagaa

SEQ ID NO: 527848 - RNA, 32 nt, Human
ugucaucuguucuggggaucuguugcuguuuc

SEQ ID NO: 527849 - RNA, 32 nt, Human
ugucaucuucccugagaaaggcugcaguggcc

SEQ ID NO: 527850 - RNA, 32 nt, Human
ugucaugaaaucuggguugaaggagaauacag

SEQ ID NO: 527851 - RNA, 32 nt, Human
ugucaugaccaucacagcagaggagugacuuu

SEQ ID NO: 527852 - RNA, 32 nt, Human
ugucaugacggggacagagugagggaauggua

SEQ ID NO: 527853 - RNA, 32 nt, Human
ugucaugagcucugcugucuuagucaaucucu

SEQ ID NO: 527854 - RNA, 23 nt, Human
ugucaugcagacuggagugcagu

SEQ ID NO: 527855 - RNA, 24 nt, Human
ugucaugcagacuggagugcagug

SEQ ID NO: 527856 - RNA, 23 nt, Human
ugucaugcaggcuggagugcggu

SEQ ID NO: 527857 - RNA, 24 nt, Human
ugucaugcaggcuggagugcggug

SEQ ID NO: 527858 - RNA, 32 nt, Human
ugucaugcaguucuuuucuuuugcuagaaaau

SEQ ID NO: 527859 - RNA, 32 nt, Human
ugucaugcccgucucuggaauguccacuccca

SEQ ID NO: 527860 - RNA, 32 nt, Human
ugucaugccugcaaucccagcacuuugggagg

SEQ ID NO: 527861 - RNA, 29 nt, Human
ugucaugccugggagcccucggcccgcgc

SEQ ID NO: 527862 - RNA, 32 nt, Human
ugucaugcuccaaaucccacacugggcugcca

SEQ ID NO: 527863 - RNA, 32 nt, Human
ugucauggaagaggguggagccgccgcccgaa

SEQ ID NO: 527864 - RNA, 32 nt, Human
ugucauggaugccugugccaccccaggcaaua

SEQ ID NO: 527865 - RNA, 32 nt, Human
ugucauggcaugugccuguaaucccagcuacu

SEQ ID NO: 527866 - RNA, 32 nt, Human
ugucauggccuccugccacucuugaggcuguc

SEQ ID NO: 527867 - RNA, 23 nt, Human
ugucaugggagacuggagugcag

SEQ ID NO: 527868 - RNA, 32 nt, Human
ugucaugggcguccagcucaaaggccaccucc

SEQ ID NO: 527869 - RNA, 32 nt, Human
ugucaugggcuggggcucagauuuuccuggcu

SEQ ID NO: 527870 - RNA, 32 nt, Human
ugucauggggguggggacagggagccaccggu

SEQ ID NO: 527871 - RNA, 32 nt, Human
ugucauggggguggggacagggagucaccggu

SEQ ID NO: 527872 - RNA, 32 nt, Human
ugucaugggugucccucuguacucagaauggg

SEQ ID NO: 527873 - RNA, 32 nt, Human
ugucauggguuauugugaggauaaaacaaggc

SEQ ID NO: 527874 - RNA, 26 nt, Human
ugucaugguucuugcucaaguaccaa

SEQ ID NO: 527875 - RNA, 32 nt, Human
ugucaugguuggaagacagaguaggaaggaua

SEQ ID NO: 527876 - RNA, 32 nt, Human
ugucaugguuuaaauuauuaucuuggugaaau

SEQ ID NO: 527877 - RNA, 32 nt, Human
ugucauguacuggguaguaggagggagccuag

SEQ ID NO: 527878 - RNA, 32 nt, Human
ugucauguacuguauauuaccuggugauaguu

SEQ ID NO: 527879 - RNA, 32 nt, Human
ugucaugucccagauuucuguuuguaccagca

SEQ ID NO: 527880 - RNA, 21 nt, Human
ugucaugucuaaacuuuggaa

SEQ ID NO: 527881 - RNA, 32 nt, Human
ugucauguggugagucaaauaagaccauuuug

SEQ ID NO: 527882 - RNA, 32 nt, Human
ugucauguuggacacaagcagacucagcuuuu

SEQ ID NO: 527883 - RNA, 32 nt, Human
ugucauguugggcuccuggggcgggggcacgg

SEQ ID NO: 527884 - RNA, 32 nt, Human
ugucauuacuaucuaaaaccacugcagggaag

SEQ ID NO: 527885 - RNA, 32 nt, Human
ugucauuaguuucaggagaguauauaauucac

SEQ ID NO: 527886 - RNA, 32 nt, Human
ugucauuaucaucugcacuucacucaagagcu

SEQ ID NO: 527887 - RNA, 32 nt, Human
ugucauucaaagauguggcuguggauuucacc

SEQ ID NO: 527888 - RNA, 32 nt, Human
ugucauucaagaaccagguuugaguggccgcu

SEQ ID NO: 527889 - RNA, 32 nt, Human
ugucauucaaguuuucaucugcuuuauaauug

SEQ ID NO: 527890 - RNA, 21 nt, Human
ugucauucaaucauucuuccu

SEQ ID NO: 527891 - RNA, 32 nt, Human
ugucauucacacaccuacuuuucugcuucguu

SEQ ID NO: 527892 - RNA, 32 nt, Human
ugucauucagaaauaccauacugugaaugacc

SEQ ID NO: 527893 - RNA, 32 nt, Human
ugucauucagaacacagccacugugaaagugc

SEQ ID NO: 527894 - RNA, 32 nt, Human
ugucauucagcccaaacucauuacuuuauguu

SEQ ID NO: 527895 - RNA, 23 nt, Human
ugucauucaggcaagagugcagu

SEQ ID NO: 527896 - RNA, 23 nt, Human
ugucauucaggcuggagugcagu

SEQ ID NO: 527897 - RNA, 24 nt, Human
ugucauucaggcuggagugcagug

SEQ ID NO: 527898 - RNA, 32 nt, Human
ugucauucaggguuuccugacugcuaaugcag

SEQ ID NO: 527899 - RNA, 32 nt, Human
ugucauucaguuacucuuaauucuuuauaaaa

SEQ ID NO: 527900 - RNA, 32 nt, Human
ugucauucauucuuuacaauacucucaauuau

SEQ ID NO: 527901 - RNA, 32 nt, Human
ugucauucccagaggaaauguucucuucacgg

SEQ ID NO: 527902 - RNA, 32 nt, Human
ugucauuccccucuuuugucuuccucagcagg

SEQ ID NO: 527903 - RNA, 32 nt, Human
ugucauuccggccucagaucucuugugcccag

SEQ ID NO: 527904 - RNA, 32 nt, Human
ugucauuccucacauccugucauugucagaga

SEQ ID NO: 527905 - RNA, 32 nt, Human
ugucauucguuagucuacauguuucuaaacau

SEQ ID NO: 527906 - RNA, 32 nt, Human
ugucauucuagucacuuccugccuugugacca

SEQ ID NO: 527907 - RNA, 32 nt, Human
ugucauucuccaccauuucugcaguuuaucac

SEQ ID NO: 527908 - RNA, 32 nt, Human
ugucauucuggcuuacauauguuuuauuuaac

SEQ ID NO: 527909 - RNA, 32 nt, Human
ugucauucuucucuuacagaggggcaguagag

SEQ ID NO: 527910 - RNA, 32 nt, Human
ugucauucuuggaagguggcagagccaagagu

SEQ ID NO: 527911 - RNA, 32 nt, Human
ugucauugagucuucucucagaaucagcgagc

SEQ ID NO: 527912 - RNA, 32 nt, Human
ugucauugcacuccagccugggcaacaagagc

SEQ ID NO: 527913 - RNA, 32 nt, Human
ugucauugcacuccagccugggcgacaagagc

SEQ ID NO: 527914 - RNA, 32 nt, Human
ugucauugcacuccagccuggggaacagagcg

SEQ ID NO: 527915 - RNA, 32 nt, Human
ugucauugcacucuagucugggugacaagagc

SEQ ID NO: 527916 - RNA, 32 nt, Human
ugucauugcgccacugcaaaccagccugggca

SEQ ID NO: 527917 - RNA, 32 nt, Human
ugucauugucuucuccaccgggcuguucccau

SEQ ID NO: 527918 - RNA, 32 nt, Human
ugucauuguuaccagcagucuccaaacuggac

SEQ ID NO: 527919 - RNA, 32 nt, Human
ugucauuuacaagcaagcaggccaggcagcug

SEQ ID NO: 527920 - RNA, 32 nt, Human
ugucauuuaucagcaaaagauugggaauuuuc

SEQ ID NO: 527921 - RNA, 32 nt, Human
ugucauuuccugcugcuuccagcuccaucccu

SEQ ID NO: 527922 - RNA, 32 nt, Human
ugucauuugagcauccacaugaucagaccuga

SEQ ID NO: 527923 - RNA, 32 nt, Human
ugucauuugcacacaaaaauaaagacuagagc

SEQ ID NO: 527924 - RNA, 32 nt, Human
ugucauuugcucggagaucugcagugaguaaa

SEQ ID NO: 527925 - RNA, 32 nt, Human
ugucauuugcuggagcucugcccauccugccc

SEQ ID NO: 527926 - RNA, 32 nt, Human
ugucauuuggagcccauuaaaaagugaggcag

SEQ ID NO: 527927 - RNA, 32 nt, Human
ugucauuuuguuuauucuacugcaguagccag

SEQ ID NO: 527928 - RNA, 32 nt, Human
uguccaaaacacgcccuugggccccgccacgu

SEQ ID NO: 527929 - RNA, 32 nt, Human
uguccaaacuucuaaggcacagaaggaaacau

SEQ ID NO: 527930 - RNA, 32 nt, Human
uguccaaacuuuuggcuucccugggccacauu

SEQ ID NO: 527931 - RNA, 32 nt, Human
uguccaaagagggugaggggauuaggaaguac

SEQ ID NO: 527932 - RNA, 32 nt, Human
uguccaaagucccaggcccagugcaguccuug

SEQ ID NO: 527933 - RNA, 32 nt, Human
uguccaaauuaauaccaacagcauuucuggga

SEQ ID NO: 527934 - RNA, 32 nt, Human
uguccaacauggcgaaccucgucucuucuaaa

SEQ ID NO: 527935 - RNA, 23 nt, Human
uguccaaccagcuacccaccuca

SEQ ID NO: 527936 - RNA, 32 nt, Human
uguccaaccagcuguucucuccucaaagcagc

SEQ ID NO: 527937 - RNA, 32 nt, Human
uguccaaccccagcugauacagguuaucuagg

SEQ ID NO: 527938 - RNA, 32 nt, Human
uguccaaccucuggugcugaagcagccaagag

SEQ ID NO: 527939 - RNA, 32 nt, Human
uguccaaccucuggugcugaagcagccgagag

SEQ ID NO: 527940 - RNA, 32 nt, Human
uguccaaccuuuugucuucccugggccacauu

SEQ ID NO: 527941 - RNA, 32 nt, Human
uguccaagacacucucaggccuggaggcaggg

SEQ ID NO: 527942 - RNA, 32 nt, Human
uguccaagacagccuggcugggaaagggggug

SEQ ID NO: 527943 - RNA, 32 nt, Human
uguccaagagccuguuuuugaaacacaagcug

SEQ ID NO: 527944 - RNA, 32 nt, Human
uguccaagcaaaauggagcuggggaagauaac

SEQ ID NO: 527945 - RNA, 32 nt, Human
uguccaagccucccccuggcucuucaguucuc

SEQ ID NO: 527946 - RNA, 32 nt, Human
uguccaagccuccgggcagcagugccaucuuc

SEQ ID NO: 527947 - RNA, 32 nt, Human
uguccaaggagaacccggagaggcucugggcu

SEQ ID NO: 527948 - RNA, 21 nt, Human
uguccaaggcuggaguguagu

SEQ ID NO: 527949 - RNA, 32 nt, Human
uguccaaggcuggaguguaguagugcuaucac

SEQ ID NO: 527950 - RNA, 32 nt, Human
uguccaaggcuggaguguaguagugcuaucgc

SEQ ID NO: 527951 - RNA, 32 nt, Human
uguccaagggcaggaggaauggacagaagcau

SEQ ID NO: 527952 - RNA, 31 nt, Human
uguccaagugagaaagacugaguugcguguc

SEQ ID NO: 527953 - RNA, 32 nt, Human
uguccaaguguccaucaccaaugccaccggcc

SEQ ID NO: 527954 - RNA, 32 nt, Human
uguccaauccagccaagguucccuccacauau

SEQ ID NO: 527955 - RNA, 32 nt, Human
uguccaauccccgcgccccacacugcccagcg

SEQ ID NO: 527956 - RNA, 32 nt, Human
uguccaaucuuuuggcuucccugggccauacu

SEQ ID NO: 527957 - RNA, 32 nt, Human
uguccaaugcugccuucccaugaaucugucuc

SEQ ID NO: 527958 - RNA, 32 nt, Human
uguccaauugccaagaauauguuaacaauuaa

SEQ ID NO: 527959 - RNA, 32 nt, Human
uguccacaaucagccauuggccugucugggga

SEQ ID NO: 527960 - RNA, 32 nt, Human
uguccacacagcugccucagaagcgccgggcu

SEQ ID NO: 527961 - RNA, 32 nt, Human
uguccacacaguuagcggagcgcaggacuucu

SEQ ID NO: 527962 - RNA, 32 nt, Human
uguccacacaugcacaccagaugagggccaug

SEQ ID NO: 527963 - RNA, 18 nt, Human
uguccacaccacucucug

SEQ ID NO: 527964 - RNA, 21 nt, Human
uguccacacccaccucccugg

SEQ ID NO: 527965 - RNA, 18 nt, Human
uguccacacccccucgcu

SEQ ID NO: 527966 - RNA, 32 nt, Human
uguccacaccccuuauccccaggcuggugccc

SEQ ID NO: 527967 - RNA, 32 nt, Human
uguccacaccucugccccagagcugccuccug

SEQ ID NO: 527968 - RNA, 32 nt, Human
uguccacacucugcucucccugggcaggaaga

SEQ ID NO: 527969 - RNA, 23 nt, Human
uguccacacuugcuacucuuuga

SEQ ID NO: 527970 - RNA, 32 nt, Human
uguccacaguacacccucccucucccagccuc

SEQ ID NO: 527971 - RNA, 32 nt, Human
uguccacauauacaaccauacauacuugcaca

SEQ ID NO: 527972 - RNA, 32 nt, Human
uguccacaucaaggagaaucauagaacuguag

SEQ ID NO: 527973 - RNA, 32 nt, Human
uguccacaugugaacuuuuucuagguggcagg

SEQ ID NO: 527974 - RNA, 22 nt, Human
uguccacaugugugccuguaga

SEQ ID NO: 527975 - RNA, 32 nt, Human
uguccaccaccaacuucucagcauguuucucu

SEQ ID NO: 527976 - RNA, 32 nt, Human
uguccaccacuccacugugcucagggaaggca

SEQ ID NO: 527977 - RNA, 20 nt, Human
uguccaccacuccaucugcc

SEQ ID NO: 527978 - RNA, 32 nt, Human
uguccaccaggauaagugacaccuaggaccca

SEQ ID NO: 527979 - RNA, 32 nt, Human
uguccacccagccggccacugugugucauggc

SEQ ID NO: 527980 - RNA, 32 nt, Human
uguccacccccaucucccuugcucauuuggau

SEQ ID NO: 527981 - RNA, 32 nt, Human
uguccacccuaguccgagggcugcagucaacu

SEQ ID NO: 527982 - RNA, 32 nt, Human
uguccacccugaccaaucacuguggccaggag

SEQ ID NO: 527983 - RNA, 32 nt, Human
uguccacccugucccuguaucucccauggaag

SEQ ID NO: 527984 - RNA, 20 nt, Human
uguccacccuuccugccuca

SEQ ID NO: 527985 - RNA, 32 nt, Human
uguccacccuugcccucagcaagagagaaugc

SEQ ID NO: 527986 - RNA, 18 nt, Human
uguccaccgugaccccug

SEQ ID NO: 527987 - RNA, 32 nt, Human
uguccaccuccagggcccccaagcuacagggg

SEQ ID NO: 527988 - RNA, 32 nt, Human
uguccaccucccacccccaacccuccaccaga

SEQ ID NO: 527989 - RNA, 32 nt, Human
uguccaccugccagguggaguguauguggcug

SEQ ID NO: 527990 - RNA, 30 nt, Human
uguccaccugggcauauccaccaccucccu

SEQ ID NO: 527991 - RNA, 19 nt, Human
uguccaccuucccaucuca

SEQ ID NO: 527992 - RNA, 32 nt, Human
uguccaccuucccaucucaucuuaccuuaauc

SEQ ID NO: 527993 - RNA, 32 nt, Human
uguccaccuuucucuccucuucccaagccuuu

SEQ ID NO: 527994 - RNA, 32 nt, Human
uguccacgcugaggcacagccuggagaggggc

SEQ ID NO: 527995 - RNA, 32 nt, Human
uguccacguaguccucuccaucugcccguagc

SEQ ID NO: 527996 - RNA, 32 nt, Human
uguccacucagcacucuucucucuccaucucu

SEQ ID NO: 527997 - RNA, 32 nt, Human
uguccacuccaggccggacugacguagccuau

SEQ ID NO: 527998 - RNA, 20 nt, Human
uguccacucccagccuccca

SEQ ID NO: 527999 - RNA, 19 nt, Human
uguccacucccggccccau

SEQ ID NO: 528000 - RNA, 32 nt, Human
uguccacuccugcccucagucuggaccugccc

SEQ ID NO: 528001 - RNA, 32 nt, Human
uguccacugagcgggauugucugcugaguggg

SEQ ID NO: 528002 - RNA, 32 nt, Human
uguccacugcaaccuccacauccuggguucaa

SEQ ID NO: 528003 - RNA, 25 nt, Human
uguccacugcacuccucccaccuca

SEQ ID NO: 528004 - RNA, 20 nt, Human
uguccacugcccucccuggu

SEQ ID NO: 528005 - RNA, 32 nt, Human
uguccacugcucacgguggcagcugcuugggc

SEQ ID NO: 528006 - RNA, 32 nt, Human
uguccacugcuuucuaacaagauaauaaaccc

SEQ ID NO: 528007 - RNA, 32 nt, Human
uguccacuggagcagcucauugccagaggcag

SEQ ID NO: 528008 - RNA, 24 nt, Human
uguccacugucaccaagcuggaug

SEQ ID NO: 528009 - RNA, 32 nt, Human
uguccacuguggaaaggaucccagacugucgu

SEQ ID NO: 528010 - RNA, 32 nt, Human
uguccacuguucuguucucauagaggaaauuc

SEQ ID NO: 528011 - RNA, 32 nt, Human
uguccacuucuggagccaagaaagacaguucc

SEQ ID NO: 528012 - RNA, 32 nt, Human
uguccacuugcagauucaacaaaaagaguguu

SEQ ID NO: 528013 - RNA, 32 nt, Human
uguccacuugcagauucuacaaaaagaguguu

SEQ ID NO: 528014 - RNA, 19 nt, Human
uguccacuuuacaaaagaa

SEQ ID NO: 528015 - RNA, 32 nt, Human
uguccacuuucugcuuuucuuucuuucuuuuu

SEQ ID NO: 528016 - RNA, 32 nt, Human
uguccacuuugccucugcugcucugccagucu

SEQ ID NO: 528017 - RNA, 32 nt, Human
uguccagaaagacauucaccacugugguucaa

SEQ ID NO: 528018 - RNA, 24 nt, Human
uguccagaaccugcucccaccuca

SEQ ID NO: 528019 - RNA, 32 nt, Human
uguccagaagugaggaggaagagaagcuggug

SEQ ID NO: 528020 - RNA, 21 nt, Human
uguccagaccauugucuucca

SEQ ID NO: 528021 - RNA, 32 nt, Human
uguccagacuggucucaaacuccugggcucaa

SEQ ID NO: 528022 - RNA, 32 nt, Human
uguccagagccaaggcuucuaccuucauuguc

SEQ ID NO: 528023 - RNA, 32 nt, Human
uguccagagccccuccacagucggccucauga

SEQ ID NO: 528024 - RNA, 32 nt, Human
uguccagagcccugucucuuuucuggaauguc

SEQ ID NO: 528025 - RNA, 32 nt, Human
uguccagaggcugacguagacagugaagggug

SEQ ID NO: 528026 - RNA, 32 nt, Human
uguccagaggcugcucugaggcugaggugugu

SEQ ID NO: 528027 - RNA, 32 nt, Human
uguccagauggaaugacucccauccucuccuc

SEQ ID NO: 528028 - RNA, 32 nt, Human
uguccagauugggcucaggauggcaguugugg

SEQ ID NO: 528029 - RNA, 23 nt, Human
uguccagauuuccaaagcuggau

SEQ ID NO: 528030 - RNA, 31 nt, Human
uguccagcagugucucccacuccuugugaag

SEQ ID NO: 528031 - RNA, 32 nt, Human
uguccagcaguucuguauauacucagaaugaa

SEQ ID NO: 528032 - RNA, 32 nt, Human
uguccagcaugaaccucagaccuaucuugagc

SEQ ID NO: 528033 - RNA, 18 nt, Human
uguccagccaggggcaga

SEQ ID NO: 528034 - RNA, 18 nt, Human
uguccagccagguugagc

SEQ ID NO: 528035 - RNA, 32 nt, Human
uguccagcccagcaugaguagcagguagagca

SEQ ID NO: 528036 - RNA, 32 nt, Human
uguccagcccagugccugggcucugggaccuc

SEQ ID NO: 528037 - RNA, 32 nt, Human
uguccagccccacaugucaauucuggagagga

SEQ ID NO: 528038 - RNA, 32 nt, Human
uguccagcccccaccccaccuccugggacccu

SEQ ID NO: 528039 - RNA, 32 nt, Human
uguccagccugaccaacauggugaaaccccau

SEQ ID NO: 528040 - RNA, 32 nt, Human
uguccagccugaguuccagccucacugagugg

SEQ ID NO: 528041 - RNA, 32 nt, Human
uguccagccugccucuucccaggcuggucuga

SEQ ID NO: 528042 - RNA, 32 nt, Human
uguccagccuggcucccuuccugggccuggcu

SEQ ID NO: 528043 - RNA, 32 nt, Human
uguccagcgcggcucccgccacccucaauaaa

SEQ ID NO: 528044 - RNA, 32 nt, Human
uguccagcucccccaaacccugcagagugcug

SEQ ID NO: 528045 - RNA, 32 nt, Human
uguccagcugcacucuccucuccugggaccca

SEQ ID NO: 528046 - RNA, 32 nt, Human
uguccagcuguggcuauggccccagccccgag

SEQ ID NO: 528047 - RNA, 32 nt, Human
uguccaggaacuuuccagcaguauccucgcug

SEQ ID NO: 528048 - RNA, 19 nt, Human
uguccaggacacugaaaug

SEQ ID NO: 528049 - RNA, 21 nt, Human
uguccaggacagcaaugggaa

SEQ ID NO: 528050 - RNA, 32 nt, Human
uguccaggagggagaggaccuccacccucuga

SEQ ID NO: 528051 - RNA, 21 nt, Human
uguccaggauggagugcagug

SEQ ID NO: 528052 - RNA, 32 nt, Human
uguccaggccaucauggccuccacugccggcu

SEQ ID NO: 528053 - RNA, 32 nt, Human
uguccaggcuacagagggugacuccagguucc

SEQ ID NO: 528054 - RNA, 21 nt, Human
uguccaggcuagagugcagug

SEQ ID NO: 528055 - RNA, 21 nt, Human
uguccaggcuggaguauaaug

SEQ ID NO: 528056 - RNA, 20 nt, Human
uguccaggcuggagugcaau

SEQ ID NO: 528057 - RNA, 21 nt, Human
uguccaggcuggagugcaaug

SEQ ID NO: 528058 - RNA, 19 nt, Human
uguccaggcuggagugcag

SEQ ID NO: 528059 - RNA, 20 nt, Human
uguccaggcuggagugcagu

SEQ ID NO: 528060 - RNA, 21 nt, Human
uguccaggcuggagugcagug

SEQ ID NO: 528061 - RNA, 32 nt, Human
uguccaggcuggccuugagcuccugggcucaa

SEQ ID NO: 528062 - RNA, 32 nt, Human
uguccaggcuggucccgaacuccugaccucag

SEQ ID NO: 528063 - RNA, 32 nt, Human
uguccaggcuggucuugaaccccugaccucaa

SEQ ID NO: 528064 - RNA, 32 nt, Human
uguccagggccagcuccugccucccggugccc

SEQ ID NO: 528065 - RNA, 32 nt, Human
uguccagggccagcucuugccucccggcggcc

SEQ ID NO: 528066 - RNA, 32 nt, Human
uguccaggggagggcccugccacccacaauuc

SEQ ID NO: 528067 - RNA, 32 nt, Human
uguccaggggcagcccuccuucccaggugugg

SEQ ID NO: 528068 - RNA, 20 nt, Human
uguccagguaaaaaugugaa

SEQ ID NO: 528069 - RNA, 32 nt, Human
uguccagguccugguggggaguggggcccuug

SEQ ID NO: 528070 - RNA, 32 nt, Human
uguccaggugcgcugggaaggguccuggcggu

SEQ ID NO: 528071 - RNA, 32 nt, Human
uguccagguggccccugaauucugcgcaaggg

SEQ ID NO: 528072 - RNA, 32 nt, Human
uguccaguagcaugaacaccgcgaacagccuc

SEQ ID NO: 528073 - RNA, 32 nt, Human
uguccaguccccagccuggccccaccagccca

SEQ ID NO: 528074 - RNA, 21 nt, Human
uguccagucuggagugcaaug

SEQ ID NO: 528075 - RNA, 32 nt, Human
uguccagugacuuagaguacauagaagaaaau

SEQ ID NO: 528076 - RNA, 32 nt, Human
uguccagugcaguagccacuacccauauguag

SEQ ID NO: 528077 - RNA, 32 nt, Human
uguccagugcauacccugccccucucugucgu

SEQ ID NO: 528078 - RNA, 32 nt, Human
uguccaguggaacgaagacuaaccucaccagc

SEQ ID NO: 528079 - RNA, 32 nt, Human
uguccaguggccacaguccuuguccaagccuc

SEQ ID NO: 528080 - RNA, 32 nt, Human
uguccaguguguacccugccccucucugucgu

SEQ ID NO: 528081 - RNA, 32 nt, Human
uguccaguucuccuccacaucucccaucccag

SEQ ID NO: 528082 - RNA, 32 nt, Human
uguccauagcuuugguugggccugugucacau

SEQ ID NO: 528083 - RNA, 31 nt, Human
uguccauaggaguccaucaaggcagagcggc

SEQ ID NO: 528084 - RNA, 32 nt, Human
uguccaucaagaaauuauggaagugguggaca

SEQ ID NO: 528085 - RNA, 18 nt, Human
uguccauccagcaccugg

SEQ ID NO: 528086 - RNA, 32 nt, Human
uguccaucccacagcucagccuggaugcccac

SEQ ID NO: 528087 - RNA, 32 nt, Human
uguccaucccuaauaccugucaccuuguccuu

SEQ ID NO: 528088 - RNA, 21 nt, Human
uguccaucuauaaacauguca

SEQ ID NO: 528089 - RNA, 32 nt, Human
uguccaucuggucuaagguggcugcuucuucc

SEQ ID NO: 528090 - RNA, 32 nt, Human
uguccaugaauccucuguggcaacuguaauca

SEQ ID NO: 528091 - RNA, 32 nt, Human
uguccaugagggagagguugcugagaaguaca

SEQ ID NO: 528092 - RNA, 32 nt, Human
uguccaugcagguguuggaagggagagcugaa

SEQ ID NO: 528093 - RNA, 32 nt, Human
uguccaugccagggaugccacagggggcccca

SEQ ID NO: 528094 - RNA, 32 nt, Human
uguccaugucaucugggagcagccuggguucc

SEQ ID NO: 528095 - RNA, 32 nt, Human
uguccaugugugaccaugugucugugaggcag

SEQ ID NO: 528096 - RNA, 32 nt, Human
uguccauucuuugccuuccuggagcucccagc

SEQ ID NO: 528097 - RNA, 32 nt, Human
uguccauuuuccagaauguauuuccaagccca

SEQ ID NO: 528098 - RNA, 21 nt, Human
ugucccaaaucccuuuagcca

SEQ ID NO: 528099 - RNA, 32 nt, Human
ugucccaacuuguggugggagcuggggcaagg

SEQ ID NO: 528100 - RNA, 20 nt, Human
ugucccaagccaucccugcu

SEQ ID NO: 528101 - RNA, 32 nt, Human
ugucccaaggagaaaagcugcaggcaucugag

SEQ ID NO: 528102 - RNA, 32 nt, Human
ugucccaaguuccagccgcgucccuggggccu

SEQ ID NO: 528103 - RNA, 32 nt, Human
ugucccaaucacugugccaggagauuuaccug

SEQ ID NO: 528104 - RNA, 28 nt, Human
ugucccacaacucuggccucaucgcccu

SEQ ID NO: 528105 - RNA, 32 nt, Human
ugucccacacagauagcagccucuugcuugcc

SEQ ID NO: 528106 - RNA, 32 nt, Human
ugucccacagaacuucccacuguggaucugug

SEQ ID NO: 528107 - RNA, 32 nt, Human
ugucccacagcagccacuugagggcagggcug

SEQ ID NO: 528108 - RNA, 32 nt, Human
ugucccaccacaacugaaccagaagagaguga

SEQ ID NO: 528109 - RNA, 32 nt, Human
ugucccaccacucauucucagcuuugaauggg

SEQ ID NO: 528110 - RNA, 32 nt, Human
ugucccaccagguccuggaggcagaugcgagg

SEQ ID NO: 528111 - RNA, 21 nt, Human
ugucccacccacccgccgccu

SEQ ID NO: 528112 - RNA, 17 nt, Human
ugucccaccuccucccu

SEQ ID NO: 528113 - RNA, 32 nt, Human
ugucccacguuuacacuccacacucacaccuc

SEQ ID NO: 528114 - RNA, 32 nt, Human
ugucccacucacuguuccaggaauucuugcag

SEQ ID NO: 528115 - RNA, 32 nt, Human
ugucccacuccucuggggccucaggccauaau

SEQ ID NO: 528116 - RNA, 32 nt, Human
ugucccacugcacagucggccauagggacgug

SEQ ID NO: 528117 - RNA, 32 nt, Human
ugucccagaaaccgucccugaagaaaccggac

SEQ ID NO: 528118 - RNA, 32 nt, Human
ugucccagaccccucuauucugcuccaggaca

SEQ ID NO: 528119 - RNA, 32 nt, Human
ugucccagagcaggccagcccgcgugggccga

SEQ ID NO: 528120 - RNA, 32 nt, Human
ugucccagagccgccuaaacgcaagaaaaguc

SEQ ID NO: 528121 - RNA, 32 nt, Human
ugucccagcaagucucucuccccaaagcagca

SEQ ID NO: 528122 - RNA, 32 nt, Human
ugucccagccacaggcuucuuguccaccucuu

SEQ ID NO: 528123 - RNA, 32 nt, Human
ugucccagccuccaacucaucuccuuccuguc

SEQ ID NO: 528124 - RNA, 32 nt, Human
ugucccagccuggaccuggcuuccugccucac

SEQ ID NO: 528125 - RNA, 32 nt, Human
ugucccagccugggcaacauagcaagacccug

SEQ ID NO: 528126 - RNA, 32 nt, Human
ugucccagcuacucaggaggcugaggcaggag

SEQ ID NO: 528127 - RNA, 32 nt, Human
ugucccagcuacucgggaggcugaggcaggag

SEQ ID NO: 528128 - RNA, 32 nt, Human
ugucccagcucugcucuaggacugccucccac

SEQ ID NO: 528129 - RNA, 32 nt, Human
ugucccaggagaauuguuagugaccccucuuu

SEQ ID NO: 528130 - RNA, 24 nt, Human
ugucccaggagcaaaugcuggaug

SEQ ID NO: 528131 - RNA, 32 nt, Human
ugucccaggcagcacagugugugaacugcuuu

SEQ ID NO: 528132 - RNA, 26 nt, Human
ugucccaggcccagggaccucugccg

SEQ ID NO: 528133 - RNA, 32 nt, Human
ugucccaggccugggcgugguggaggaagggg

SEQ ID NO: 528134 - RNA, 32 nt, Human
ugucccaggccuguugccagaugaggccacgc

SEQ ID NO: 528135 - RNA, 21 nt, Human
ugucccaggcuagagugcagu

SEQ ID NO: 528136 - RNA, 22 nt, Human
ugucccaggcuagagugcagug

SEQ ID NO: 528137 - RNA, 32 nt, Human
ugucccaggcuggaagguggagcgagaagugg

SEQ ID NO: 528138 - RNA, 22 nt, Human
ugucccaggcuggagugcagug

SEQ ID NO: 528139 - RNA, 32 nt, Human
ugucccaggcuggagugcaguggcacagucuc

SEQ ID NO: 528140 - RNA, 32 nt, Human
ugucccagggccuccaugucagccaggaauuc

SEQ ID NO: 528141 - RNA, 31 nt, Human
ugucccaggguggaagguggggagggggccg

SEQ ID NO: 528142 - RNA, 32 nt, Human
ugucccaucacaccugagaugucagacauggg

SEQ ID NO: 528143 - RNA, 32 nt, Human
ugucccaugaagcccucuccucagcuuuacuu

SEQ ID NO: 528144 - RNA, 20 nt, Human
ugucccaugacuuguucugg

SEQ ID NO: 528145 - RNA, 32 nt, Human
ugucccaugauccccucucuuccuccccaccc

SEQ ID NO: 528146 - RNA, 32 nt, Human
ugucccaugcccacccuccccacgcugcagug

SEQ ID NO: 528147 - RNA, 32 nt, Human
uguccccaaaccuauggaaguuguugcuauac

SEQ ID NO: 528148 - RNA, 24 nt, Human
uguccccaaggcuggagugcagug

SEQ ID NO: 528149 - RNA, 32 nt, Human
uguccccaaucagcaaguggucgugccuggcu

SEQ ID NO: 528150 - RNA, 21 nt, Human
uguccccacauccugauagcc

SEQ ID NO: 528151 - RNA, 21 nt, Human
uguccccacccaugcgccuuc

SEQ ID NO: 528152 - RNA, 18 nt, Human
uguccccaccccauccca

SEQ ID NO: 528153 - RNA, 20 nt, Human
uguccccaccucagugccug

SEQ ID NO: 528154 - RNA, 32 nt, Human
uguccccaccucagugccugcggggcccugag

SEQ ID NO: 528155 - RNA, 22 nt, Human
uguccccaccuccccagccuuc

SEQ ID NO: 528156 - RNA, 17 nt, Human
uguccccaccuccuccc

SEQ ID NO: 528157 - RNA, 32 nt, Human
uguccccaccuccuccccaugggcaccaucuc

SEQ ID NO: 528158 - RNA, 23 nt, Human
uguccccaccucucccagccugu

SEQ ID NO: 528159 - RNA, 32 nt, Human
uguccccacgucuuggccauucaccucugaaa

SEQ ID NO: 528160 - RNA, 32 nt, Human
uguccccacuguaccagccucugauaagcugc

SEQ ID NO: 528161 - RNA, 31 nt, Human
uguccccagagaggaggauguggugagcccc

SEQ ID NO: 528162 - RNA, 32 nt, Human
uguccccagagaggaggauguggugagccccg

SEQ ID NO: 528163 - RNA, 32 nt, Human
uguccccagagcugcuuguggguuucuggggu

SEQ ID NO: 528164 - RNA, 32 nt, Human
uguccccagaggcaaggaacuaugugagccac

SEQ ID NO: 528165 - RNA, 32 nt, Human
uguccccagcuggggugagcgcucagagggcc

SEQ ID NO: 528166 - RNA, 32 nt, Human
uguccccagcuguguccagccugucugcaggg

SEQ ID NO: 528167 - RNA, 32 nt, Human
uguccccagcuucugauggcagccaggagaau

SEQ ID NO: 528168 - RNA, 32 nt, Human
uguccccaggagcugggaugccaggucgauuu

SEQ ID NO: 528169 - RNA, 32 nt, Human
uguccccaggauggccagcuugaggaugaagu

SEQ ID NO: 528170 - RNA, 32 nt, Human
uguccccaggcucacucagccuggcggccaug

SEQ ID NO: 528171 - RNA, 32 nt, Human
uguccccaggcuggagaaucgcuugacccagg

SEQ ID NO: 528172 - RNA, 32 nt, Human
uguccccagggugggggaagggccaggcagag

SEQ ID NO: 528173 - RNA, 32 nt, Human
uguccccaguauuuauugaacagcugucuaug

SEQ ID NO: 528174 - RNA, 32 nt, Human
uguccccaguggaggcauggccagcaucugcu

SEQ ID NO: 528175 - RNA, 32 nt, Human
uguccccaguuccugaggacaaagggccuggc

SEQ ID NO: 528176 - RNA, 18 nt, Human
uguccccaucaaaaagaa

SEQ ID NO: 528177 - RNA, 24 nt, Human
uguccccauccaaauaucaccuua

SEQ ID NO: 528178 - RNA, 22 nt, Human
uguccccauccccccacugccu

SEQ ID NO: 528179 - RNA, 18 nt, Human
uguccccauccgccuuca

SEQ ID NO: 528180 - RNA, 22 nt, Human
uguccccauccugggaagccug

SEQ ID NO: 528181 - RNA, 19 nt, Human
uguccccaucugucggccu

SEQ ID NO: 528182 - RNA, 32 nt, Human
uguccccaugagcaauaaaacucucuccuuau

SEQ ID NO: 528183 - RNA, 21 nt, Human
uguccccaugcaccuugcuca

SEQ ID NO: 528184 - RNA, 32 nt, Human
uguccccaugggcucccacugcagccucgagu

SEQ ID NO: 528185 - RNA, 24 nt, Human
ugucccccaagcuggaguacaaug

SEQ ID NO: 528186 - RNA, 18 nt, Human
ugucccccacagaccugc

SEQ ID NO: 528187 - RNA, 32 nt, Human
ugucccccacccacugccaaguacaaugaccu

SEQ ID NO: 528188 - RNA, 32 nt, Human
ugucccccagaggccuugggcugcaguugcag

SEQ ID NO: 528189 - RNA, 22 nt, Human
ugucccccaggaucccacuccu

SEQ ID NO: 528190 - RNA, 22 nt, Human
ugucccccaggcugaagugcag

SEQ ID NO: 528191 - RNA, 19 nt, Human
ugucccccaggcuggagug

SEQ ID NO: 528192 - RNA, 23 nt, Human
ugucccccaggcuggagugcagu

SEQ ID NO: 528193 - RNA, 24 nt, Human
ugucccccaggcuggagugcagug

SEQ ID NO: 528194 - RNA, 24 nt, Human
ugucccccaggcuggagugcgaug

SEQ ID NO: 528195 - RNA, 32 nt, Human
ugucccccaggcuggaguggugcaguggcacg

SEQ ID NO: 528196 - RNA, 24 nt, Human
ugucccccaggcuugagugcaaug

SEQ ID NO: 528197 - RNA, 20 nt, Human
ugucccccauccccaccgcc

SEQ ID NO: 528198 - RNA, 20 nt, Human
uguccccccacacccgucca

SEQ ID NO: 528199 - RNA, 22 nt, Human
uguccccccagacugugagcuc

SEQ ID NO: 528200 - RNA, 23 nt, Human
uguccccccaggcaucuucacuc

SEQ ID NO: 528201 - RNA, 21 nt, Human
uguccccccaggccguguaca

SEQ ID NO: 528202 - RNA, 22 nt, Human
uguccccccaggccucuccuca

SEQ ID NO: 528203 - RNA, 20 nt, Human
uguccccccaugccuggccc

SEQ ID NO: 528204 - RNA, 20 nt, Human
uguccccccgccccccguca

SEQ ID NO: 528205 - RNA, 32 nt, Human
ugucccccgccccgccucuccaaaaagcuaca

SEQ ID NO: 528206 - RNA, 25 nt, Human
ugucccccgcccgccgcuucugucc

SEQ ID NO: 528207 - RNA, 32 nt, Human
ugucccccgccuccuccuccccauuuccgggc

SEQ ID NO: 528208 - RNA, 32 nt, Human
ugucccccgugcacgguucaaugguagauucg

SEQ ID NO: 528209 - RNA, 32 nt, Human
ugucccccuacccuaaaccccaguuagguacc

SEQ ID NO: 528210 - RNA, 32 nt, Human
ugucccccuccccucuuagccccucagugugu

SEQ ID NO: 528211 - RNA, 22 nt, Human
ugucccccucccugaacuuccu

SEQ ID NO: 528212 - RNA, 22 nt, Human
ugucccccucuuagccccugcc

SEQ ID NO: 528213 - RNA, 32 nt, Human
ugucccccugcaaaccugcuugcugaccucag

SEQ ID NO: 528214 - RNA, 32 nt, Human
ugucccccugcagguggagcugcugggcugcg

SEQ ID NO: 528215 - RNA, 32 nt, Human
ugucccccugucagcugccuccagaagggaag

SEQ ID NO: 528216 - RNA, 21 nt, Human
ugucccccugucgccacugcu

SEQ ID NO: 528217 - RNA, 32 nt, Human
ugucccccuuucucccaaggccuccugaagcg

SEQ ID NO: 528218 - RNA, 32 nt, Human
uguccccgccauguggcccccuuguuccaggg

SEQ ID NO: 528219 - RNA, 23 nt, Human
uguccccggcagccagugcucuc

SEQ ID NO: 528220 - RNA, 32 nt, Human
uguccccguuuccccucccccuucccuucucc

SEQ ID NO: 528221 - RNA, 19 nt, Human
uguccccuaagcaccuggu

SEQ ID NO: 528222 - RNA, 24 nt, Human
uguccccuaggcugcagugcagug

SEQ ID NO: 528223 - RNA, 31 nt, Human
uguccccucaaaaucucauguugaaauguga

SEQ ID NO: 528224 - RNA, 32 nt, Human
uguccccucacagggaggggagcaggggaggg

SEQ ID NO: 528225 - RNA, 22 nt, Human
uguccccucauccccaguagcc

SEQ ID NO: 528226 - RNA, 32 nt, Human
uguccccuccacccucacuccauccaccucgg

SEQ ID NO: 528227 - RNA, 21 nt, Human
uguccccucccacccgccuca

SEQ ID NO: 528228 - RNA, 24 nt, Human
uguccccucccccaccacacaccu

SEQ ID NO: 528229 - RNA, 32 nt, Human
uguccccuccuacuucuugcugccucacgguu

SEQ ID NO: 528230 - RNA, 32 nt, Human
uguccccuccucccccuccacagccccugagg

SEQ ID NO: 528231 - RNA, 32 nt, Human
uguccccuccuuuccucccuccuuccuuccac

SEQ ID NO: 528232 - RNA, 32 nt, Human
uguccccucuacucugccacguaggcccguca

SEQ ID NO: 528233 - RNA, 32 nt, Human
uguccccucucauccuauucugugccaaaugu

SEQ ID NO: 528234 - RNA, 32 nt, Human
uguccccugacacuccacagugugccugcaac

SEQ ID NO: 528235 - RNA, 32 nt, Human
uguccccugcagcuuccguggugccuuugcug

SEQ ID NO: 528236 - RNA, 32 nt, Human
uguccccugcccuccccuccccaacuaccccc

SEQ ID NO: 528237 - RNA, 32 nt, Human
uguccccugccugcguccuggggccugugcac

SEQ ID NO: 528238 - RNA, 32 nt, Human
uguccccugcuccccuccuaccacuguccagg

SEQ ID NO: 528239 - RNA, 32 nt, Human
uguccccugcugagaaauggagagcucuuuuc

SEQ ID NO: 528240 - RNA, 32 nt, Human
uguccccugcugcucugaggggagaggggugg

SEQ ID NO: 528241 - RNA, 32 nt, Human
uguccccuggaaaagccauaagaugggaccca

SEQ ID NO: 528242 - RNA, 22 nt, Human
uguccccuggagccccacugcc

SEQ ID NO: 528243 - RNA, 32 nt, Human
uguccccuggagugugucagagcccaggggag

SEQ ID NO: 528244 - RNA, 32 nt, Human
uguccccugggaacugcaagaugcacaggacc

SEQ ID NO: 528245 - RNA, 32 nt, Human
uguccccuuccaccugcccucucccccaaagc

SEQ ID NO: 528246 - RNA, 23 nt, Human
uguccccuuccccacccacugcc

SEQ ID NO: 528247 - RNA, 24 nt, Human
uguccccuuccccacccacugccu

SEQ ID NO: 528248 - RNA, 20 nt, Human
uguccccuuccccacccucu

SEQ ID NO: 528249 - RNA, 22 nt, Human
uguccccuucccccaccuuccu

SEQ ID NO: 528250 - RNA, 22 nt, Human
uguccccuuccccguguaugcc

SEQ ID NO: 528251 - RNA, 21 nt, Human
uguccccuuccccuccccucc

SEQ ID NO: 528252 - RNA, 19 nt, Human
uguccccuuccccugugcc

SEQ ID NO: 528253 - RNA, 22 nt, Human
uguccccuuccucuccucugcc

SEQ ID NO: 528254 - RNA, 21 nt, Human
uguccccuuccugucugccca

SEQ ID NO: 528255 - RNA, 20 nt, Human
uguccccuuccuguucuucc

SEQ ID NO: 528256 - RNA, 32 nt, Human
uguccccuucuugcugccacaggaugaauaaa

SEQ ID NO: 528257 - RNA, 32 nt, Human
uguccccuucuuugcuaggaccccaguuaaaa

SEQ ID NO: 528258 - RNA, 32 nt, Human
uguccccuuuccacuuccccagcuucugcccc

SEQ ID NO: 528259 - RNA, 19 nt, Human
uguccccuuugggcuccuu

SEQ ID NO: 528260 - RNA, 20 nt, Human
uguccccuuuucuccacucc

SEQ ID NO: 528261 - RNA, 32 nt, Human
ugucccgaagaugcagucuucucuccaaugau

SEQ ID NO: 528262 - RNA, 32 nt, Human
ugucccgacacauaaucucugucucuuggacc

SEQ ID NO: 528263 - RNA, 32 nt, Human
ugucccgcccaggagccuugcaggcuggaggg

SEQ ID NO: 528264 - RNA, 32 nt, Human
ugucccgccgcgcuugccaaggguuggcugcg

SEQ ID NO: 528265 - RNA, 32 nt, Human
ugucccgcuagugccugcuaggugcauggcca

SEQ ID NO: 528266 - RNA, 32 nt, Human
ugucccgcugccacuuuccucacugauauugg

SEQ ID NO: 528267 - RNA, 32 nt, Human
ugucccggaggagguugggagguggaggccca

SEQ ID NO: 528268 - RNA, 32 nt, Human
ugucccggcagcaggagcuugguugguguuag

SEQ ID NO: 528269 - RNA, 32 nt, Human
ugucccggcggcauccacauguuuccggacac

SEQ ID NO: 528270 - RNA, 23 nt, Human
ugucccgggccccauugcuucca

SEQ ID NO: 528271 - RNA, 22 nt, Human
ugucccgggccccccaggcgga

SEQ ID NO: 528272 - RNA, 22 nt, Human
ugucccggggccguggugcccg

SEQ ID NO: 528273 - RNA, 32 nt, Human
ugucccuaaccagccacugcagcccuccagcu

SEQ ID NO: 528274 - RNA, 32 nt, Human
ugucccuacaaaaaguacaaaaauuagccggg

SEQ ID NO: 528275 - RNA, 32 nt, Human
ugucccuacauagcaauuuucuguggcacuga

SEQ ID NO: 528276 - RNA, 32 nt, Human
ugucccuacaucuucucuucugacuuuggcua

SEQ ID NO: 528277 - RNA, 32 nt, Human
ugucccuacccacccuggauuuucuggccccc

SEQ ID NO: 528278 - RNA, 22 nt, Human
ugucccuacuaaaaauacaaaa

SEQ ID NO: 528279 - RNA, 32 nt, Human
ugucccuacuaaaaauacaaaaauuaggugga

SEQ ID NO: 528280 - RNA, 21 nt, Human
ugucccuacuaaagauacaaa

SEQ ID NO: 528281 - RNA, 32 nt, Human
ugucccuacuaaagauacaaacaauuagccgg

SEQ ID NO: 528282 - RNA, 32 nt, Human
ugucccuacuucaagagcauguucacaggugg

SEQ ID NO: 528283 - RNA, 32 nt, Human
ugucccuagaaaacaaugcaaaaccuuugagg

SEQ ID NO: 528284 - RNA, 32 nt, Human
ugucccuaguaaaaaugcaaaaauuagcuggg

SEQ ID NO: 528285 - RNA, 32 nt, Human
ugucccuaguaguugggauuacaggcacaugc

SEQ ID NO: 528286 - RNA, 32 nt, Human
ugucccucacacuaaaacggcguagauggcaa

SEQ ID NO: 528287 - RNA, 25 nt, Human
ugucccuccaccccacccuccaccu

SEQ ID NO: 528288 - RNA, 32 nt, Human
ugucccuccccacacuccacauucauauguug

SEQ ID NO: 528289 - RNA, 32 nt, Human
ugucccucccccuugucuuucccuucaguacc

SEQ ID NO: 528290 - RNA, 31 nt, Human
ugucccucccucucugaaccugcuuccuccg

SEQ ID NO: 528291 - RNA, 20 nt, Human
ugucccuccuccaccccaca

SEQ ID NO: 528292 - RNA, 21 nt, Human
ugucccuccucccagaugaca

SEQ ID NO: 528293 - RNA, 32 nt, Human
ugucccuccuguucuuguccggcgcugcuuag

SEQ ID NO: 528294 - RNA, 32 nt, Human
ugucccucgauccagucuccgacuuccauuuc

SEQ ID NO: 528295 - RNA, 32 nt, Human
ugucccucggccagggcagauggaagcgggug

SEQ ID NO: 528296 - RNA, 32 nt, Human
ugucccucgggggcuuugggaaagcauggcac

SEQ ID NO: 528297 - RNA, 32 nt, Human
ugucccucgucuaauccaaggcucuucccagg

SEQ ID NO: 528298 - RNA, 32 nt, Human
ugucccucuacgacgggcugguauaucccagg

SEQ ID NO: 528299 - RNA, 32 nt, Human
ugucccucucacuaaaaaggaguguugugugu

SEQ ID NO: 528300 - RNA, 32 nt, Human
ugucccucucaggccuucuaggcacgugccug

SEQ ID NO: 528301 - RNA, 32 nt, Human
ugucccucugccacaguggcuuccuuccaucc

SEQ ID NO: 528302 - RNA, 22 nt, Human
ugucccucuguccccauguccu

SEQ ID NO: 528303 - RNA, 32 nt, Human
ugucccucugugagagaaggagcaggcagaga

SEQ ID NO: 528304 - RNA, 32 nt, Human
ugucccucuuccuucccaguugcccuuaagaa

SEQ ID NO: 528305 - RNA, 32 nt, Human
ugucccugagcaaacaacgcccgaaauacccu

SEQ ID NO: 528306 - RNA, 32 nt, Human
ugucccugaguaguuuugcugccauagguuaa

SEQ ID NO: 528307 - RNA, 32 nt, Human
ugucccugcugauugucaaagcagaaagaaau

SEQ ID NO: 528308 - RNA, 32 nt, Human
ugucccugcuggcugaggagccgcugcuggga

SEQ ID NO: 528309 - RNA, 32 nt, Human
ugucccugcuucuuuucugaccgggaaauaaa

SEQ ID NO: 528310 - RNA, 32 nt, Human
ugucccuggaauugagaaucuggaccuuauuu

SEQ ID NO: 528311 - RNA, 32 nt, Human
ugucccuggacacagcucuucauuccauugac

SEQ ID NO: 528312 - RNA, 20 nt, Human
ugucccuggagaguagccug

SEQ ID NO: 528313 - RNA, 21 nt, Human
ugucccuggcaugugccuuca

SEQ ID NO: 528314 - RNA, 18 nt, Human
ugucccuggcccaucuca

SEQ ID NO: 528315 - RNA, 32 nt, Human
ugucccuggccugccuugauuucagccacacc

SEQ ID NO: 528316 - RNA, 19 nt, Human
ugucccuggcugcgcuuuc

SEQ ID NO: 528317 - RNA, 32 nt, Human
ugucccugggagagggcagccgccggccuguc

SEQ ID NO: 528318 - RNA, 32 nt, Human
ugucccugggcaauggaaugucucgguauaaa

SEQ ID NO: 528319 - RNA, 32 nt, Human
ugucccugggccucugcccuugcugacuacuu

SEQ ID NO: 528320 - RNA, 32 nt, Human
ugucccuggggcagacacuaaggcagguguug

SEQ ID NO: 528321 - RNA, 32 nt, Human
ugucccugucgcgugcuugggcauuuuauuuu

SEQ ID NO: 528322 - RNA, 32 nt, Human
ugucccugucuagggcagcccagggcccccac

SEQ ID NO: 528323 - RNA, 32 nt, Human
ugucccugucucccugcccauuuccuaugcau

SEQ ID NO: 528324 - RNA, 32 nt, Human
ugucccuguggacucccaaacucuacuccaga

SEQ ID NO: 528325 - RNA, 32 nt, Human
ugucccuguggucccagcuacucaggaggcug

SEQ ID NO: 528326 - RNA, 32 nt, Human
ugucccugugugacacggcucggaugaccccc

SEQ ID NO: 528327 - RNA, 32 nt, Human
ugucccuuagccaaccugcugggcucaccagu

SEQ ID NO: 528328 - RNA, 25 nt, Human
ugucccuucacugcacuuucuuccu

SEQ ID NO: 528329 - RNA, 32 nt, Human
ugucccuucaggcucacaugcacaggaaugcu

SEQ ID NO: 528330 - RNA, 32 nt, Human
ugucccuucauacccuagucccuggacagcug

SEQ ID NO: 528331 - RNA, 32 nt, Human
ugucccuuccauuucugagaacaagucagccc

SEQ ID NO: 528332 - RNA, 32 nt, Human
ugucccuucccagccuuugaggaguuagggaa

SEQ ID NO: 528333 - RNA, 32 nt, Human
ugucccuucugccccaggggcuugccuggcuu

SEQ ID NO: 528334 - RNA, 32 nt, Human
ugucccuucuguccucaggggccuucagaagc

SEQ ID NO: 528335 - RNA, 23 nt, Human
ugucccuucuucacaccuacuca

SEQ ID NO: 528336 - RNA, 32 nt, Human
ugucccuugaugggugcccuccaggaaccaag

SEQ ID NO: 528337 - RNA, 21 nt, Human
ugucccuugcacccccugccu

SEQ ID NO: 528338 - RNA, 32 nt, Human
ugucccuugcucagaagaaagaucggguaacu

SEQ ID NO: 528339 - RNA, 32 nt, Human
ugucccuugguauccaugggguauugguuccu

SEQ ID NO: 528340 - RNA, 32 nt, Human
ugucccuugucacuuuguugcaagcuagaaau

SEQ ID NO: 528341 - RNA, 21 nt, Human
ugucccuuuuagagacaccuu

SEQ ID NO: 528342 - RNA, 23 nt, Human
ugucccuuuucccacccuccacc

SEQ ID NO: 528343 - RNA, 21 nt, Human
uguccgagccuguggucaagg

SEQ ID NO: 528344 - RNA, 32 nt, Human
uguccgaggaguugggggaccaucccagcagg

SEQ ID NO: 528345 - RNA, 32 nt, Human
uguccgaggcaccacuguuucuugccuggagu

SEQ ID NO: 528346 - RNA, 32 nt, Human
uguccgagggccaccaggccgccgggggccug

SEQ ID NO: 528347 - RNA, 32 nt, Human
uguccgagugugccacacgagaaccugaaggg

SEQ ID NO: 528348 - RNA, 32 nt, Human
uguccgaguuugcagggugcugagcuguaugg

SEQ ID NO: 528349 - RNA, 32 nt, Human
uguccgcagccuccaggagccccacacagggc

SEQ ID NO: 528350 - RNA, 32 nt, Human
uguccgcauacaggcguacacaugcacgcuug

SEQ ID NO: 528351 - RNA, 23 nt, Human
uguccgccaggcuggagugcagu

SEQ ID NO: 528352 - RNA, 24 nt, Human
uguccgccaggcuggagugcagug

SEQ ID NO: 528353 - RNA, 32 nt, Human
uguccgcccaggcugggugcagucacggcuca

SEQ ID NO: 528354 - RNA, 32 nt, Human
uguccgcccugccugccugccuguguggucug

SEQ ID NO: 528355 - RNA, 32 nt, Human
uguccgcccuucacaccuccagccucacguuc

SEQ ID NO: 528356 - RNA, 32 nt, Human
uguccgccgcugcagccgccuccuccuccagg

SEQ ID NO: 528357 - RNA, 32 nt, Human
uguccgccggccccagcacccaggggacgcgc

SEQ ID NO: 528358 - RNA, 32 nt, Human
uguccgccugcagggcauuccagaaagaugag

SEQ ID NO: 528359 - RNA, 32 nt, Human
uguccgcggcagcugucuuuuugcuacuauaa

SEQ ID NO: 528360 - RNA, 32 nt, Human
uguccgcggcugcugcucagcgcccuggcaca

SEQ ID NO: 528361 - RNA, 32 nt, Human
uguccgcuccccucugggucgaggccacagcu

SEQ ID NO: 528362 - RNA, 32 nt, Human
uguccggaagacauggauugucuggaagaugu

SEQ ID NO: 528363 - RNA, 32 nt, Human
uguccggagccagcucacugucuuccacacug

SEQ ID NO: 528364 - RNA, 32 nt, Human
uguccggcguaaggacgacaccgucagcuguc

SEQ ID NO: 528365 - RNA, 20 nt, Human
uguccggcucucugguggcc

SEQ ID NO: 528366 - RNA, 32 nt, Human
uguccggcugucauuucuccaccuagagccuu

SEQ ID NO: 528367 - RNA, 32 nt, Human
uguccggggucccugcacccacggucacuugg

SEQ ID NO: 528368 - RNA, 24 nt, Human
uguccgggguucggccauguccuc

SEQ ID NO: 528369 - RNA, 32 nt, Human
uguccgucaguguguggauguauguuuacagu

SEQ ID NO: 528370 - RNA, 32 nt, Human
uguccgucaguuauuaguggauggagauuccc

SEQ ID NO: 528371 - RNA, 32 nt, Human
uguccguccagagccggcauccuugccugucu

SEQ ID NO: 528372 - RNA, 32 nt, Human
uguccgucugcagcugcgugacugucugucuc

SEQ ID NO: 528373 - RNA, 32 nt, Human
uguccgucugggcacugguccaugaccuguug

SEQ ID NO: 528374 - RNA, 32 nt, Human
uguccgugcuugcuggugccucuuuucaguag

SEQ ID NO: 528375 - RNA, 32 nt, Human
uguccguggcggcugguguuggcuggcauugg

SEQ ID NO: 528376 - RNA, 32 nt, Human
uguccguguggaggggacauagacacugcaug

SEQ ID NO: 528377 - RNA, 21 nt, Human
uguccguucccacccaccccc

SEQ ID NO: 528378 - RNA, 32 nt, Human
uguccuaaccaccgggcgcaccaucuuuccuu

SEQ ID NO: 528379 - RNA, 32 nt, Human
uguccuaagagcugcacccuggagauggggug

SEQ ID NO: 528380 - RNA, 32 nt, Human
uguccuaaggaaccuuccuuccugcuugaguu

SEQ ID NO: 528381 - RNA, 32 nt, Human
uguccuaaugugcugcccagaaaccucaacug

SEQ ID NO: 528382 - RNA, 32 nt, Human
uguccuaccacuuugaaugguuuucuaauauc

SEQ ID NO: 528383 - RNA, 32 nt, Human
uguccuacuuuccucauugccuaggcaaccau

SEQ ID NO: 528384 - RNA, 32 nt, Human
uguccuagaagagggaagaggaaggaaggugg

SEQ ID NO: 528385 - RNA, 32 nt, Human
uguccuagagaggcccagcagagcagcucaga

SEQ ID NO: 528386 - RNA, 32 nt, Human
uguccuagaugagaacccugaagaaugcagac

SEQ ID NO: 528387 - RNA, 32 nt, Human
uguccuagcucaggucugggugccauucuuua

SEQ ID NO: 528388 - RNA, 32 nt, Human
uguccuagucagaugaaggaggcugcacuaca

SEQ ID NO: 528389 - RNA, 32 nt, Human
uguccuaguccuagugcugaaugaucccauug

SEQ ID NO: 528390 - RNA, 32 nt, Human
uguccuaucaaauuaguaaaccaaaggaaaag

SEQ ID NO: 528391 - RNA, 32 nt, Human
uguccuaugucccagggauaccgcucaaagca

SEQ ID NO: 528392 - RNA, 32 nt, Human
uguccuauuucuaucuccacuuugugccugga

SEQ ID NO: 528393 - RNA, 32 nt, Human
uguccucaacaacagcaaagcuucuugggaga

SEQ ID NO: 528394 - RNA, 22 nt, Human
uguccucaaucucucugucucc

SEQ ID NO: 528395 - RNA, 32 nt, Human
uguccucacccaguuccugcagugucucugac

SEQ ID NO: 528396 - RNA, 32 nt, Human
uguccucagacccaaguaggagagggcugcug

SEQ ID NO: 528397 - RNA, 32 nt, Human
uguccucagaccccugaggugcaggauguggg

SEQ ID NO: 528398 - RNA, 32 nt, Human
uguccucagagcagccucgccugcugacccca

SEQ ID NO: 528399 - RNA, 32 nt, Human
uguccucagaggaggaggaggaggaggcagcu

SEQ ID NO: 528400 - RNA, 32 nt, Human
uguccucagcaacacuccacagcagaaagggg

SEQ ID NO: 528401 - RNA, 32 nt, Human
uguccucagcauccucccgucccaacccaacc

SEQ ID NO: 528402 - RNA, 21 nt, Human
uguccucagcucaagaauccu

SEQ ID NO: 528403 - RNA, 20 nt, Human
uguccucagcucccagggcu

SEQ ID NO: 528404 - RNA, 21 nt, Human
uguccucagcucccaucuccu

SEQ ID NO: 528405 - RNA, 32 nt, Human
uguccucagcugguugguagaguuugagcuuc

SEQ ID NO: 528406 - RNA, 32 nt, Human
uguccucagcuugucuggaggaggccugcauc

SEQ ID NO: 528407 - RNA, 32 nt, Human
uguccucaggauagggaagagcagggggaugc

SEQ ID NO: 528408 - RNA, 32 nt, Human
uguccucagggugggcagagccacuaaacuug

SEQ ID NO: 528409 - RNA, 32 nt, Human
uguccucaggguggggcagguuggcacuuccc

SEQ ID NO: 528410 - RNA, 32 nt, Human
uguccucaguggaaggugaugggggccggugc

SEQ ID NO: 528411 - RNA, 32 nt, Human
uguccucaucacccucuuuugcugccugucaa

SEQ ID NO: 528412 - RNA, 32 nt, Human
uguccucaucaccugugucuuugcugcuuuug

SEQ ID NO: 528413 - RNA, 32 nt, Human
uguccucaucccugcccagcaggcugcagaac

SEQ ID NO: 528414 - RNA, 32 nt, Human
uguccucaucucugccugccuucccucuugcc

SEQ ID NO: 528415 - RNA, 32 nt, Human
uguccucaugugguggaaggggugaggggucu

SEQ ID NO: 528416 - RNA, 32 nt, Human
uguccuccaaagugcugggauuacaggcauga

SEQ ID NO: 528417 - RNA, 23 nt, Human
uguccuccacuccagcuguuucc

SEQ ID NO: 528418 - RNA, 22 nt, Human
uguccuccaggcaccugggucc

SEQ ID NO: 528419 - RNA, 23 nt, Human
uguccuccaggcuggagugcaau

SEQ ID NO: 528420 - RNA, 24 nt, Human
uguccuccaggcuggagugcaaug

SEQ ID NO: 528421 - RNA, 32 nt, Human
uguccuccaggcuggggcagguucuuaguuug

SEQ ID NO: 528422 - RNA, 32 nt, Human
uguccucccaacugaaaacaacagugacaugu

SEQ ID NO: 528423 - RNA, 26 nt, Human
uguccuccccacaaacacuguguccu

SEQ ID NO: 528424 - RNA, 32 nt, Human
uguccuccccuccccucccuuccucuccuccc

SEQ ID NO: 528425 - RNA, 32 nt, Human
uguccuccccugauaggauucucccuuugaag

SEQ ID NO: 528426 - RNA, 24 nt, Human
uguccucccgcuccucgcuguccu

SEQ ID NO: 528427 - RNA, 32 nt, Human
uguccucccuccaccuaccacucacaugacac

SEQ ID NO: 528428 - RNA, 22 nt, Human
uguccucccugcccugcagucc

SEQ ID NO: 528429 - RNA, 32 nt, Human
uguccucccugccuuccaccuuggagaggagg

SEQ ID NO: 528430 - RNA, 21 nt, Human
uguccucccuucccugugccu

SEQ ID NO: 528431 - RNA, 32 nt, Human
uguccucccuuguggcuuccuuagcuccuguu

SEQ ID NO: 528432 - RNA, 32 nt, Human
uguccuccgcacagccggucagaacuguguga

SEQ ID NO: 528433 - RNA, 32 nt, Human
uguccuccggaccuacccaggucuccaccauc

SEQ ID NO: 528434 - RNA, 32 nt, Human
uguccuccgggaccccagcccucaggauuccu

SEQ ID NO: 528435 - RNA, 28 nt, Human
uguccuccucacagagagcucagagaug

SEQ ID NO: 528436 - RNA, 32 nt, Human
uguccuccucaccaagggccacccucaccaga

SEQ ID NO: 528437 - RNA, 32 nt, Human
uguccuccuccacuucccaugccucuauguua

SEQ ID NO: 528438 - RNA, 20 nt, Human
uguccuccuccccauguccu

SEQ ID NO: 528439 - RNA, 32 nt, Human
uguccuccuccccuggacaaucuccucuugga

SEQ ID NO: 528440 - RNA, 32 nt, Human
uguccuccugcucugcuuccucagggcccagc

SEQ ID NO: 528441 - RNA, 32 nt, Human
uguccuccugggagcagggguugggggagggg

SEQ ID NO: 528442 - RNA, 32 nt, Human
uguccuccuuggagguccccaaagaaggaguc

SEQ ID NO: 528443 - RNA, 32 nt, Human
uguccucgacccaccuguccagcuucaucccu

SEQ ID NO: 528444 - RNA, 32 nt, Human
uguccucgcccuguauuucuccaucuccaguu

SEQ ID NO: 528445 - RNA, 32 nt, Human
uguccucgcucuaccucugccucuccggaggu

SEQ ID NO: 528446 - RNA, 32 nt, Human
uguccucggaucacagucucuucucacuacag

SEQ ID NO: 528447 - RNA, 32 nt, Human
uguccucggugcauccggcugcagagggaaau

SEQ ID NO: 528448 - RNA, 32 nt, Human
uguccucggugccaccaccccugugguacaag

SEQ ID NO: 528449 - RNA, 32 nt, Human
uguccucguccuggccugcagcucuucccagc

SEQ ID NO: 528450 - RNA, 32 nt, Human
uguccucuacuuccaugaggccuucgagaggc

SEQ ID NO: 528451 - RNA, 32 nt, Human
uguccucucagccuguggccuccacauccccg

SEQ ID NO: 528452 - RNA, 32 nt, Human
uguccucucaucccaguccugauggccgcuug

SEQ ID NO: 528453 - RNA, 32 nt, Human
uguccucuccccuccagccuuuggccuuggcu

SEQ ID NO: 528454 - RNA, 32 nt, Human
uguccucucccucgacccucccccuccuuguc

SEQ ID NO: 528455 - RNA, 32 nt, Human
uguccucucgacuuccuuccuuagcuucaugu

SEQ ID NO: 528456 - RNA, 32 nt, Human
uguccucucuaggaagggguaggggaggggcg

SEQ ID NO: 528457 - RNA, 32 nt, Human
uguccucugacccuuuggcucauccuagauug

SEQ ID NO: 528458 - RNA, 32 nt, Human
uguccucugauucccaccccuacccaccaaaa

SEQ ID NO: 528459 - RNA, 32 nt, Human
uguccucugcaacccaaacguccaggaggauc

SEQ ID NO: 528460 - RNA, 32 nt, Human
uguccucugcaagcccccugcuguggcuuggu

SEQ ID NO: 528461 - RNA, 21 nt, Human
uguccucugcaccaaugacac

SEQ ID NO: 528462 - RNA, 32 nt, Human
uguccucugcagcuuuugauauguuauucuca

SEQ ID NO: 528463 - RNA, 32 nt, Human
uguccucugccaccccugcccacuguccaggg

SEQ ID NO: 528464 - RNA, 32 nt, Human
uguccucugccucccucugcuguucuucuaga

SEQ ID NO: 528465 - RNA, 32 nt, Human
uguccucugccugggcucuggaagaggccuuc

SEQ ID NO: 528466 - RNA, 32 nt, Human
uguccucugcugucuccucugguccugagaug

SEQ ID NO: 528467 - RNA, 24 nt, Human
uguccucuggaucugcugcguccu

SEQ ID NO: 528468 - RNA, 32 nt, Human
uguccucugggagcuuuccuuguuugguuuuc

SEQ ID NO: 528469 - RNA, 32 nt, Human
uguccucugugcaguggaaggaggaggggcga

SEQ ID NO: 528470 - RNA, 32 nt, Human
uguccucugugccucuuuccuugucugaggug

SEQ ID NO: 528471 - RNA, 32 nt, Human
uguccucuucuccccucucucagauuggccug

SEQ ID NO: 528472 - RNA, 32 nt, Human
uguccucuugggaacagcccucagccagcagu

SEQ ID NO: 528473 - RNA, 32 nt, Human
uguccucuuucagcuccugaccaguugcaguc

SEQ ID NO: 528474 - RNA, 32 nt, Human
uguccucuuucagcuccugauccguugcaguc

SEQ ID NO: 528475 - RNA, 32 nt, Human
uguccugaaacccagaagugauggagagaaac

SEQ ID NO: 528476 - RNA, 32 nt, Human
uguccugaaagccacagacaauauggucccaa

SEQ ID NO: 528477 - RNA, 32 nt, Human
uguccugaaaggaagacauaaguguugugauu

SEQ ID NO: 528478 - RNA, 32 nt, Human
uguccugaagucaacccaaaaaucaacacuac

SEQ ID NO: 528479 - RNA, 32 nt, Human
uguccugacuucauaggugccaccuugugguu

SEQ ID NO: 528480 - RNA, 32 nt, Human
uguccugagauggacgucagguccagccugcc

SEQ ID NO: 528481 - RNA, 32 nt, Human
uguccugagccugcuugucaccugggccucac

SEQ ID NO: 528482 - RNA, 32 nt, Human
uguccugaggggauacuguggagcagcccagu

SEQ ID NO: 528483 - RNA, 32 nt, Human
uguccugaguaguugcucccagcugggaaagg

SEQ ID NO: 528484 - RNA, 32 nt, Human
uguccugaguguuuacagcaggccauguacua

SEQ ID NO: 528485 - RNA, 32 nt, Human
uguccugaugucugagacacuguccauugugc

SEQ ID NO: 528486 - RNA, 32 nt, Human
uguccugcaguuggaggccaccagagguaucu

SEQ ID NO: 528487 - RNA, 24 nt, Human
uguccugcauccagucuguguccu

SEQ ID NO: 528488 - RNA, 32 nt, Human
uguccugccacaucucccucuccgagagggua

SEQ ID NO: 528489 - RNA, 32 nt, Human
uguccugccaggcaccguggucucauccgccu

SEQ ID NO: 528490 - RNA, 21 nt, Human
uguccugccauccuguguccu

SEQ ID NO: 528491 - RNA, 32 nt, Human
uguccugcccauguccuccuugguggacguuu

SEQ ID NO: 528492 - RNA, 24 nt, Human
uguccugccccaccacaaaaggaa

SEQ ID NO: 528493 - RNA, 32 nt, Human
uguccugcccccaaggaggcagccuggaccac

SEQ ID NO: 528494 - RNA, 32 nt, Human
uguccugccuccaugcugucccuucucagcac

SEQ ID NO: 528495 - RNA, 32 nt, Human
uguccugccuugaugaagccugugccaccugc

SEQ ID NO: 528496 - RNA, 32 nt, Human
uguccugcucagugccaaggugcuacucuugc

SEQ ID NO: 528497 - RNA, 32 nt, Human
uguccugcuggauccuuccugcaguggcucgg

SEQ ID NO: 528498 - RNA, 32 nt, Human
uguccugcugggacaacuaagaagagagaaug

SEQ ID NO: 528499 - RNA, 32 nt, Human
uguccugcuguuacuccuucuuugguaguuga

SEQ ID NO: 528500 - RNA, 22 nt, Human
uguccuggacaacauggugaaa

SEQ ID NO: 528501 - RNA, 32 nt, Human
uguccuggaggcacugggaagccuagagaagg

SEQ ID NO: 528502 - RNA, 32 nt, Human
uguccuggaugcugggauacaagaauagcaga

SEQ ID NO: 528503 - RNA, 32 nt, Human
uguccuggccagagaagacugguaggggccga

SEQ ID NO: 528504 - RNA, 32 nt, Human
uguccuggccugccacugacccugucuguauu

SEQ ID NO: 528505 - RNA, 32 nt, Human
uguccuggcgcacaccuguaaucccagcuacu

SEQ ID NO: 528506 - RNA, 32 nt, Human
uguccuggcuggaccagccacugugggaccaa

SEQ ID NO: 528507 - RNA, 32 nt, Human
uguccugggauccucagaagccugacuguccu

SEQ ID NO: 528508 - RNA, 32 nt, Human
uguccugggaucuaguuaucuuggcccugcac

SEQ ID NO: 528509 - RNA, 32 nt, Human
uguccugggccaaggagcagggagacaggagg

SEQ ID NO: 528510 - RNA, 32 nt, Human
uguccuggggagaaggaaggcugagccucucc

SEQ ID NO: 528511 - RNA, 32 nt, Human
uguccuggguguuugcagcaggccauguacua

SEQ ID NO: 528512 - RNA, 32 nt, Human
uguccuggguucccauggacucagggauuugu

SEQ ID NO: 528513 - RNA, 32 nt, Human
uguccugguaccugggcccagcucgccaggga

SEQ ID NO: 528514 - RNA, 32 nt, Human
uguccuggucaguuuucacagaggcgguugua

SEQ ID NO: 528515 - RNA, 32 nt, Human
uguccugguguucauuucaaggccaguguuca

SEQ ID NO: 528516 - RNA, 32 nt, Human
uguccuguaaaugcagaacaugccauguaauu

SEQ ID NO: 528517 - RNA, 32 nt, Human
uguccuguauagcaaccuauuuugacugcuuc

SEQ ID NO: 528518 - RNA, 32 nt, Human
uguccugucaucuagccaucugauaucuuccu

SEQ ID NO: 528519 - RNA, 32 nt, Human
uguccugucccugccagcaccuggagcaccaa

SEQ ID NO: 528520 - RNA, 32 nt, Human
uguccuguccugacuucaucucuccuucugcc

SEQ ID NO: 528521 - RNA, 32 nt, Human
uguccugugagugugacccugacucauccaga

SEQ ID NO: 528522 - RNA, 32 nt, Human
uguccuguggagcugccgccauggccccgcgg

SEQ ID NO: 528523 - RNA, 32 nt, Human
uguccugugugucuguccuccuugugaucagu

SEQ ID NO: 528524 - RNA, 32 nt, Human
uguccuguguuuuguaaagaugaggguuauuu

SEQ ID NO: 528525 - RNA, 32 nt, Human
uguccuguugguaggagguggggccaagagug

SEQ ID NO: 528526 - RNA, 32 nt, Human
uguccuguuguggggcuggagcugcucccacc

SEQ ID NO: 528527 - RNA, 32 nt, Human
uguccuguuucucacccagcaccuggggagau

SEQ ID NO: 528528 - RNA, 32 nt, Human
uguccuguuuuuaaaauauacaauuauucuua

SEQ ID NO: 528529 - RNA, 32 nt, Human
uguccuuaaauacuuuaugccucugaacuuuc

SEQ ID NO: 528530 - RNA, 32 nt, Human
uguccuuacccuccaagccucaguuuaccuuu

SEQ ID NO: 528531 - RNA, 32 nt, Human
uguccuuagaaccaccuuccccuacuucaucu

SEQ ID NO: 528532 - RNA, 32 nt, Human
uguccuuagaaggagaaagacagagacacauc

SEQ ID NO: 528533 - RNA, 32 nt, Human
uguccuuagacuccugagguuuuuacacuugc

SEQ ID NO: 528534 - RNA, 32 nt, Human
uguccuuagacuccuucuccccaaucacgaga

SEQ ID NO: 528535 - RNA, 32 nt, Human
uguccuuauaagaagaggagauuaggucacag

SEQ ID NO: 528536 - RNA, 32 nt, Human
uguccuuaugugaagcuuugaagguguacagc

SEQ ID NO: 528537 - RNA, 32 nt, Human
uguccuucagccccuggaaggugcuccaggau

SEQ ID NO: 528538 - RNA, 32 nt, Human
uguccuucagguagcugagacuacaggcgugc

SEQ ID NO: 528539 - RNA, 32 nt, Human
uguccuucaucuuucccuuucccuucaaaucu

SEQ ID NO: 528540 - RNA, 32 nt, Human
uguccuucauuucuccuucauuucucagucac

SEQ ID NO: 528541 - RNA, 32 nt, Human
uguccuuccaagagacagaagaggagacacag

SEQ ID NO: 528542 - RNA, 32 nt, Human
uguccuuccaauauaugcauuacagaugaaaa

SEQ ID NO: 528543 - RNA, 32 nt, Human
uguccuucccgcagcuggcccugugguguucc

SEQ ID NO: 528544 - RNA, 32 nt, Human
uguccuuccgggcuagauuucuucuuucucuu

SEQ ID NO: 528545 - RNA, 32 nt, Human
uguccuuccugcucuuucuucucugcccaggc

SEQ ID NO: 528546 - RNA, 32 nt, Human
uguccuuccuggcccuugcauggaugcaguug

SEQ ID NO: 528547 - RNA, 32 nt, Human
uguccuuccuucaguguuccugggugaggagu

SEQ ID NO: 528548 - RNA, 32 nt, Human
uguccuucuaagcuucugaugcacugaauuau

SEQ ID NO: 528549 - RNA, 32 nt, Human
uguccuucuccucuuuguccuccugcuuuccg

SEQ ID NO: 528550 - RNA, 32 nt, Human
uguccuucugccaagguggauuuguuagucuc

SEQ ID NO: 528551 - RNA, 32 nt, Human
uguccuugaacccaccuuccuccaucccugcc

SEQ ID NO: 528552 - RNA, 32 nt, Human
uguccuugacucugugcugcugccuucugcag

SEQ ID NO: 528553 - RNA, 32 nt, Human
uguccuugagaaccuuguccucccugcugauu

SEQ ID NO: 528554 - RNA, 32 nt, Human
uguccuugcacuccuaucuggagauaucacag

SEQ ID NO: 528555 - RNA, 32 nt, Human
uguccuugcauuggugcgccucaggccaggcu

SEQ ID NO: 528556 - RNA, 32 nt, Human
uguccuugcccagcgccaccaggcuggaggcg

SEQ ID NO: 528557 - RNA, 32 nt, Human
uguccuugcucaugccugccucuuucacuugg

SEQ ID NO: 528558 - RNA, 21 nt, Human
uguccuugcugcccuggcccu

SEQ ID NO: 528559 - RNA, 32 nt, Human
uguccuugcuugugccugccucuuucacuugg

SEQ ID NO: 528560 - RNA, 32 nt, Human
uguccuuggcagcagggaggaagcaggagugc

SEQ ID NO: 528561 - RNA, 32 nt, Human
uguccuugggcgcugcuuggagauacugggcu

SEQ ID NO: 528562 - RNA, 32 nt, Human
uguccuuggggaggggucagcucuggccccaa

SEQ ID NO: 528563 - RNA, 32 nt, Human
uguccuuggggcggggugguugcaguaguguc

SEQ ID NO: 528564 - RNA, 32 nt, Human
uguccuuggucacugaggccauuggaucuucc

SEQ ID NO: 528565 - RNA, 18 nt, Human
uguccuuggugccuggag

SEQ ID NO: 528566 - RNA, 32 nt, Human
uguccuuguguaugguacuaaauguguccugu

SEQ ID NO: 528567 - RNA, 32 nt, Human
uguccuuguucucauuaauucagcuaaaggug

SEQ ID NO: 528568 - RNA, 32 nt, Human
uguccuuucauuucucuauccaaguagcaguc

SEQ ID NO: 528569 - RNA, 32 nt, Human
uguccuuucccccuucccagacaacaggagaa

SEQ ID NO: 528570 - RNA, 32 nt, Human
uguccuuuccccucagcugucuuugcuucaca

SEQ ID NO: 528571 - RNA, 32 nt, Human
uguccuuucuuucccuuccuuacuaauaaugg

SEQ ID NO: 528572 - RNA, 22 nt, Human
uguccuuugcccccugugcccu

SEQ ID NO: 528573 - RNA, 32 nt, Human
uguccuuugggggccccaggagguagagauuc

SEQ ID NO: 528574 - RNA, 32 nt, Human
uguccuuuuucaucccuucaucuugcugcugg

SEQ ID NO: 528575 - RNA, 32 nt, Human
ugucgaaagacaccugccugcuuugcgacucc

SEQ ID NO: 528576 - RNA, 32 nt, Human
ugucgaagcuaucugcucuguuaaauuaagca

SEQ ID NO: 528577 - RNA, 32 nt, Human
ugucgaauucaugggugugugugcacauguug

SEQ ID NO: 528578 - RNA, 32 nt, Human
ugucgagcauuugacauaagacagcgugaugu

SEQ ID NO: 528579 - RNA, 32 nt, Human
ugucgaggaagggaagaaagaaacagaaguca

SEQ ID NO: 528580 - RNA, 32 nt, Human
ugucgaggagcaaggcuugccagcaagucaga

SEQ ID NO: 528581 - RNA, 32 nt, Human
ugucgaggaugcacuguguggagaaaugcccu

SEQ ID NO: 528582 - RNA, 32 nt, Human
ugucgagguggccauguugccaggcaaauaug

SEQ ID NO: 528583 - RNA, 32 nt, Human
ugucgaugcccgccaggacuguuuucaugcug

SEQ ID NO: 528584 - RNA, 32 nt, Human
ugucgcacucagccaacauuccuguuuuugaa

SEQ ID NO: 528585 - RNA, 31 nt, Human
ugucgcacugccucccacccugugucugcuu

SEQ ID NO: 528586 - RNA, 32 nt, Human
ugucgcacugccucccacccugugucugcuuc

SEQ ID NO: 528587 - RNA, 32 nt, Human
ugucgcagagggcauugugacauaucacuggu

SEQ ID NO: 528588 - RNA, 32 nt, Human
ugucgcagccuuccucacucuguuccucggcc

SEQ ID NO: 528589 - RNA, 32 nt, Human
ugucgcaggcggggcuccugggaggcuggggu

SEQ ID NO: 528590 - RNA, 32 nt, Human
ugucgcaggggcuccagcgauaccucagccuu

SEQ ID NO: 528591 - RNA, 22 nt, Human
ugucgccaagccagagugcagu

SEQ ID NO: 528592 - RNA, 23 nt, Human
ugucgccaagccagagugcagug

SEQ ID NO: 528593 - RNA, 23 nt, Human
ugucgccaaggcuggagugcagu

SEQ ID NO: 528594 - RNA, 24 nt, Human
ugucgccaaggcuggagugcagug

SEQ ID NO: 528595 - RNA, 32 nt, Human
ugucgccaaguuggagcuugcagugagccgag

SEQ ID NO: 528596 - RNA, 22 nt, Human
ugucgccaaguuggagugcaau

SEQ ID NO: 528597 - RNA, 23 nt, Human
ugucgccaaguuggagugcaaug

SEQ ID NO: 528598 - RNA, 32 nt, Human
ugucgccacagcugcccagcuggguccgcugc

SEQ ID NO: 528599 - RNA, 32 nt, Human
ugucgccaccuggacagcgugaccucaggggu

SEQ ID NO: 528600 - RNA, 22 nt, Human
ugucgccagacuggagugcagu

SEQ ID NO: 528601 - RNA, 23 nt, Human
ugucgccagacuggagugcagug

SEQ ID NO: 528602 - RNA, 23 nt, Human
ugucgccaggcuagagugcggug

SEQ ID NO: 528603 - RNA, 22 nt, Human
ugucgccaggcugaagugcagu

SEQ ID NO: 528604 - RNA, 23 nt, Human
ugucgccaggcugaagugcagug

SEQ ID NO: 528605 - RNA, 22 nt, Human
ugucgccaggcuggaaugcagu

SEQ ID NO: 528606 - RNA, 23 nt, Human
ugucgccaggcuggaaugcagua

SEQ ID NO: 528607 - RNA, 23 nt, Human
ugucgccaggcuggaaugcagug

SEQ ID NO: 528608 - RNA, 22 nt, Human
ugucgccaggcuggagugcaau

SEQ ID NO: 528609 - RNA, 23 nt, Human
ugucgccaggcuggagugcaaug

SEQ ID NO: 528610 - RNA, 22 nt, Human
ugucgccaggcuggagugcagu

SEQ ID NO: 528611 - RNA, 23 nt, Human
ugucgccaggcuggagugcagug

SEQ ID NO: 528612 - RNA, 22 nt, Human
ugucgccaggcuggaguguagu

SEQ ID NO: 528613 - RNA, 23 nt, Human
ugucgccaggcuggaguguagug

SEQ ID NO: 528614 - RNA, 22 nt, Human
ugucgccagguuggagugcagu

SEQ ID NO: 528615 - RNA, 23 nt, Human
ugucgccagguuggagugcagug

SEQ ID NO: 528616 - RNA, 23 nt, Human
ugucgcccaacuagaguguagug

SEQ ID NO: 528617 - RNA, 23 nt, Human
ugucgcccaagcuagagugcagu

SEQ ID NO: 528618 - RNA, 24 nt, Human
ugucgcccaagcuagagugcagug

SEQ ID NO: 528619 - RNA, 23 nt, Human
ugucgcccaagcuggagcgcaau

SEQ ID NO: 528620 - RNA, 24 nt, Human
ugucgcccaagcuggagcgcaaug

SEQ ID NO: 528621 - RNA, 23 nt, Human
ugucgcccaagcuggaguacagu

SEQ ID NO: 528622 - RNA, 24 nt, Human
ugucgcccaagcuggaguacagug

SEQ ID NO: 528623 - RNA, 23 nt, Human
ugucgcccaagcuggagugcagu

SEQ ID NO: 528624 - RNA, 24 nt, Human
ugucgcccaagcuggagugcagug

SEQ ID NO: 528625 - RNA, 32 nt, Human
ugucgcccacccaggcuggaguacaguggcac

SEQ ID NO: 528626 - RNA, 23 nt, Human
ugucgcccagacuagaaugcagu

SEQ ID NO: 528627 - RNA, 24 nt, Human
ugucgcccagacuagaaugcagug

SEQ ID NO: 528628 - RNA, 23 nt, Human
ugucgcccagacuagagugcaau

SEQ ID NO: 528629 - RNA, 24 nt, Human
ugucgcccagacuagagugcaaug

SEQ ID NO: 528630 - RNA, 23 nt, Human
ugucgcccagacuggaguccagu

SEQ ID NO: 528631 - RNA, 20 nt, Human
ugucgcccagacuggagugc

SEQ ID NO: 528632 - RNA, 23 nt, Human
ugucgcccagacuggagugcagu

SEQ ID NO: 528633 - RNA, 24 nt, Human
ugucgcccagacuggagugcagug

SEQ ID NO: 528634 - RNA, 24 nt, Human
ugucgcccagacuggagugcugug

SEQ ID NO: 528635 - RNA, 23 nt, Human
ugucgcccagacuguaguacagu

SEQ ID NO: 528636 - RNA, 24 nt, Human
ugucgcccagacuguaguacagug

SEQ ID NO: 528637 - RNA, 32 nt, Human
ugucgcccagaggccgagcgccgcugugacgu

SEQ ID NO: 528638 - RNA, 23 nt, Human
ugucgcccagccuggagugcagu

SEQ ID NO: 528639 - RNA, 24 nt, Human
ugucgcccagccuggagugcagug

SEQ ID NO: 528640 - RNA, 23 nt, Human
ugucgcccaggauggagugcagu

SEQ ID NO: 528641 - RNA, 24 nt, Human
ugucgcccaggauggagugcagug

SEQ ID NO: 528642 - RNA, 24 nt, Human
ugucgcccaggcuagaguauagug

SEQ ID NO: 528643 - RNA, 26 nt, Human
ugucgcccaggcuagaguauaguggu

SEQ ID NO: 528644 - RNA, 19 nt, Human
ugucgcccaggcuagagug

SEQ ID NO: 528645 - RNA, 23 nt, Human
ugucgcccaggcuagagugcagu

SEQ ID NO: 528646 - RNA, 24 nt, Human
ugucgcccaggcuagagugcagug

SEQ ID NO: 528647 - RNA, 32 nt, Human
ugucgcccaggcugcaaccucgaccucccggg

SEQ ID NO: 528648 - RNA, 23 nt, Human
ugucgcccaggcugcagugcagu

SEQ ID NO: 528649 - RNA, 24 nt, Human
ugucgcccaggcugcagugcagug

SEQ ID NO: 528650 - RNA, 20 nt, Human
ugucgcccaggcuggaaugc

SEQ ID NO: 528651 - RNA, 23 nt, Human
ugucgcccaggcuggaaugcagu

SEQ ID NO: 528652 - RNA, 24 nt, Human
ugucgcccaggcuggaaugcagug

SEQ ID NO: 528653 - RNA, 23 nt, Human
ugucgcccaggcuggaaugcugu

SEQ ID NO: 528654 - RNA, 23 nt, Human
ugucgcccaggcuggacugcagu

SEQ ID NO: 528655 - RNA, 24 nt, Human
ugucgcccaggcuggacugcagug

SEQ ID NO: 528656 - RNA, 23 nt, Human
ugucgcccaggcuggagagcagu

SEQ ID NO: 528657 - RNA, 24 nt, Human
ugucgcccaggcuggagagcagug

SEQ ID NO: 528658 - RNA, 23 nt, Human
ugucgcccaggcuggagcgcaau

SEQ ID NO: 528659 - RNA, 24 nt, Human
ugucgcccaggcuggagcgcaaug

SEQ ID NO: 528660 - RNA, 23 nt, Human
ugucgcccaggcuggagcgcagu

SEQ ID NO: 528661 - RNA, 24 nt, Human
ugucgcccaggcuggagcgcagug

SEQ ID NO: 528662 - RNA, 23 nt, Human
ugucgcccaggcuggagggcagu

SEQ ID NO: 528663 - RNA, 24 nt, Human
ugucgcccaggcuggagggcagug

SEQ ID NO: 528664 - RNA, 24 nt, Human
ugucgcccaggcuggagguuaaug

SEQ ID NO: 528665 - RNA, 32 nt, Human
ugucgcccaggcuggagguuaauggcaugauc

SEQ ID NO: 528666 - RNA, 19 nt, Human
ugucgcccaggcuggagua

SEQ ID NO: 528667 - RNA, 23 nt, Human
ugucgcccaggcuggaguacaau

SEQ ID NO: 528668 - RNA, 24 nt, Human
ugucgcccaggcuggaguacaaug

SEQ ID NO: 528669 - RNA, 23 nt, Human
ugucgcccaggcuggaguacagu

SEQ ID NO: 528670 - RNA, 24 nt, Human
ugucgcccaggcuggaguacagug

SEQ ID NO: 528671 - RNA, 19 nt, Human
ugucgcccaggcuggagug

SEQ ID NO: 528672 - RNA, 23 nt, Human
ugucgcccaggcuggagugagug

SEQ ID NO: 528673 - RNA, 28 nt, Human
ugucgcccaggcuggagugagugcagug

SEQ ID NO: 528674 - RNA, 32 nt, Human
ugucgcccaggcuggagugagugcaguggcgc

SEQ ID NO: 528675 - RNA, 21 nt, Human
ugucgcccaggcuggagugca

SEQ ID NO: 528676 - RNA, 23 nt, Human
ugucgcccaggcuggagugcaau

SEQ ID NO: 528677 - RNA, 24 nt, Human
ugucgcccaggcuggagugcaaug

SEQ ID NO: 528678 - RNA, 24 nt, Human
ugucgcccaggcuggagugcacug

SEQ ID NO: 528679 - RNA, 22 nt, Human
ugucgcccaggcuggagugcag

SEQ ID NO: 528680 - RNA, 23 nt, Human
ugucgcccaggcuggagugcagu

SEQ ID NO: 528681 - RNA, 24 nt, Human
ugucgcccaggcuggagugcagug

SEQ ID NO: 528682 - RNA, 32 nt, Human
ugucgcccaggcuggagugcagugagcugaga

SEQ ID NO: 528683 - RNA, 24 nt, Human
ugucgcccaggcuggagugcauug

SEQ ID NO: 528684 - RNA, 23 nt, Human
ugucgcccaggcuggagugcgau

SEQ ID NO: 528685 - RNA, 24 nt, Human
ugucgcccaggcuggagugcgaug

SEQ ID NO: 528686 - RNA, 23 nt, Human
ugucgcccaggcuggagugcggu

SEQ ID NO: 528687 - RNA, 24 nt, Human
ugucgcccaggcuggagugcggug

SEQ ID NO: 528688 - RNA, 23 nt, Human
ugucgcccaggcuggaguguagu

SEQ ID NO: 528689 - RNA, 24 nt, Human
ugucgcccaggcuggaguguagug

SEQ ID NO: 528690 - RNA, 23 nt, Human
ugucgcccaggcuggaguguggu

SEQ ID NO: 528691 - RNA, 24 nt, Human
ugucgcccaggcuggaguguggug

SEQ ID NO: 528692 - RNA, 24 nt, Human
ugucgcccaggcuggcgugaagug

SEQ ID NO: 528693 - RNA, 23 nt, Human
ugucgcccaggcuggcgugcagu

SEQ ID NO: 528694 - RNA, 24 nt, Human
ugucgcccaggcuggcgugcagug

SEQ ID NO: 528695 - RNA, 23 nt, Human
ugucgcccaggcuggggugcagu

SEQ ID NO: 528696 - RNA, 24 nt, Human
ugucgcccaggcuggggugcagug

SEQ ID NO: 528697 - RNA, 23 nt, Human
ugucgcccaggcuggguugcagu

SEQ ID NO: 528698 - RNA, 24 nt, Human
ugucgcccaggcuggguugcagug

SEQ ID NO: 528699 - RNA, 23 nt, Human
ugucgcccaggcuguagugcaau

SEQ ID NO: 528700 - RNA, 24 nt, Human
ugucgcccaggcuguagugcaaug

SEQ ID NO: 528701 - RNA, 24 nt, Human
ugucgcccaggcuguagugcagug

SEQ ID NO: 528702 - RNA, 24 nt, Human
ugucgcccagggcuggagugcagu

SEQ ID NO: 528703 - RNA, 25 nt, Human
ugucgcccagggcuggagugcagug

SEQ ID NO: 528704 - RNA, 32 nt, Human
ugucgcccagggcuggagugcaguggcgcgau

SEQ ID NO: 528705 - RNA, 23 nt, Human
ugucgcccaggguggagugcagu

SEQ ID NO: 528706 - RNA, 24 nt, Human
ugucgcccaggguggagugcagug

SEQ ID NO: 528707 - RNA, 24 nt, Human
ugucgcccaggguggagugcggug

SEQ ID NO: 528708 - RNA, 20 nt, Human
ugucgcccagguuggagugc

SEQ ID NO: 528709 - RNA, 23 nt, Human
ugucgcccagguuggagugcagu

SEQ ID NO: 528710 - RNA, 24 nt, Human
ugucgcccagguuggagugcagug

SEQ ID NO: 528711 - RNA, 24 nt, Human
ugucgcccagguuggagugccaug

SEQ ID NO: 528712 - RNA, 23 nt, Human
ugucgcccagguuguaaugcagu

SEQ ID NO: 528713 - RNA, 24 nt, Human
ugucgcccagguuguaaugcagug

SEQ ID NO: 528714 - RNA, 23 nt, Human
ugucgcccagucuguaaugcagu

SEQ ID NO: 528715 - RNA, 23 nt, Human
ugucgcccaugcuggagugcagu

SEQ ID NO: 528716 - RNA, 24 nt, Human
ugucgcccaugcuggagugcagug

SEQ ID NO: 528717 - RNA, 32 nt, Human
ugucgccccucggagcagcagccgccgcgguc

SEQ ID NO: 528718 - RNA, 31 nt, Human
ugucgccccugcaaggagguggcugaaagug

SEQ ID NO: 528719 - RNA, 32 nt, Human
ugucgcccgacaacagguaccuguacgugaac

SEQ ID NO: 528720 - RNA, 32 nt, Human
ugucgcccucggcagcucaguguucacaguca

SEQ ID NO: 528721 - RNA, 23 nt, Human
ugucgcccuggcuggagugcaau

SEQ ID NO: 528722 - RNA, 24 nt, Human
ugucgcccuggcuggagugcaaug

SEQ ID NO: 528723 - RNA, 23 nt, Human
ugucgcccuggcuggaguggaau

SEQ ID NO: 528724 - RNA, 24 nt, Human
ugucgcccuggcuggaguggaaug

SEQ ID NO: 528725 - RNA, 32 nt, Human
ugucgccgagccccgagcgcacggugaugcuc

SEQ ID NO: 528726 - RNA, 22 nt, Human
ugucgccgaggcugcagugcag

SEQ ID NO: 528727 - RNA, 21 nt, Human
ugucgccgccgccgccgccac

SEQ ID NO: 528728 - RNA, 32 nt, Human
ugucgccgccgccgccgccauuggagucgacg

SEQ ID NO: 528729 - RNA, 24 nt, Human
ugucgccuacgcuggagugcagug

SEQ ID NO: 528730 - RNA, 21 nt, Human
ugucgccuaggcuggagugca

SEQ ID NO: 528731 - RNA, 22 nt, Human
ugucgccuaggcuggagugcaa

SEQ ID NO: 528732 - RNA, 23 nt, Human
ugucgccuaggcuggagugcagu

SEQ ID NO: 528733 - RNA, 24 nt, Human
ugucgccuaggcuggagugcagug

SEQ ID NO: 528734 - RNA, 32 nt, Human
ugucgccucacugcggccucccgaguccaaag

SEQ ID NO: 528735 - RNA, 32 nt, Human
ugucgccucuggacacaaguggcgacagccug

SEQ ID NO: 528736 - RNA, 32 nt, Human
ugucgccugcagcugcucgccugucuccgucg

SEQ ID NO: 528737 - RNA, 32 nt, Human
ugucgccugcgccccggcugggcuccgggacc

SEQ ID NO: 528738 - RNA, 22 nt, Human
ugucgccuggcuggagugcagu

SEQ ID NO: 528739 - RNA, 23 nt, Human
ugucgccuggcuggagugcagug

SEQ ID NO: 528740 - RNA, 23 nt, Human
ugucgccuggcuggaguggagug

SEQ ID NO: 528741 - RNA, 23 nt, Human
ugucgccugggcuggaguacagu

SEQ ID NO: 528742 - RNA, 24 nt, Human
ugucgccugggcuggaguacagug

SEQ ID NO: 528743 - RNA, 32 nt, Human
ugucgccuguaaugccagcgcuuugggaggcg

SEQ ID NO: 528744 - RNA, 32 nt, Human
ugucgccuguggucccugucauucacucgggu

SEQ ID NO: 528745 - RNA, 23 nt, Human
ugucgcgccagcuggagugcagu

SEQ ID NO: 528746 - RNA, 32 nt, Human
ugucgcgcccgaggagggccuggaccuuucgu

SEQ ID NO: 528747 - RNA, 32 nt, Human
ugucgcgccuguaaucccagcacuuugggagg

SEQ ID NO: 528748 - RNA, 19 nt, Human
ugucgcgcgccugcagcac

SEQ ID NO: 528749 - RNA, 31 nt, Human
ugucgcgucuugauuuucccuuucuuugaug

SEQ ID NO: 528750 - RNA, 32 nt, Human
ugucgcuaguccuaaggagaaaccuuuaacca

SEQ ID NO: 528751 - RNA, 32 nt, Human
ugucgcucagccgccguccacacucgcugcag

SEQ ID NO: 528752 - RNA, 24 nt, Human
ugucgcucagccuggagugcagug

SEQ ID NO: 528753 - RNA, 23 nt, Human
ugucgcucaggcuggagugcagu

SEQ ID NO: 528754 - RNA, 24 nt, Human
ugucgcucaggcuggagugcagug

SEQ ID NO: 528755 - RNA, 32 nt, Human
ugucgcugagagccucacgagucgagguccug

SEQ ID NO: 528756 - RNA, 22 nt, Human
ugucgcugccucggccccgggc

SEQ ID NO: 528757 - RNA, 32 nt, Human
ugucgcugcugccucuguccagcugaaaugac

SEQ ID NO: 528758 - RNA, 18 nt, Human
ugucgcuggagugcagug

SEQ ID NO: 528759 - RNA, 19 nt, Human
ugucgcuggagugcagugg

SEQ ID NO: 528760 - RNA, 32 nt, Human
ugucgcuggucugugugguauucaaagcagua

SEQ ID NO: 528761 - RNA, 32 nt, Human
ugucgcugucaggcuggccaggucagcugugu

SEQ ID NO: 528762 - RNA, 32 nt, Human
ugucgcuuagauaggaaagggauccagggaaa

SEQ ID NO: 528763 - RNA, 23 nt, Human
ugucgcuuagcuggagugcggug

SEQ ID NO: 528764 - RNA, 32 nt, Human
ugucgcuucucuggugcccagcucccuuccug

SEQ ID NO: 528765 - RNA, 32 nt, Human
ugucgcuuguaaucucagcuacuugggagacu

SEQ ID NO: 528766 - RNA, 32 nt, Human
ugucggaacagugacugcugaccugccaagag

SEQ ID NO: 528767 - RNA, 32 nt, Human
ugucggagaagagagcuugccgacgaugccuu

SEQ ID NO: 528768 - RNA, 32 nt, Human
ugucggagaagcuuccgccugaagccacuaaa

SEQ ID NO: 528769 - RNA, 32 nt, Human
ugucggagccgcccgccucuuccuucagcgcg

SEQ ID NO: 528770 - RNA, 32 nt, Human
ugucggagcugcaggggucccuacccucagag

SEQ ID NO: 528771 - RNA, 32 nt, Human
ugucggagucugcacaggagagaggccuuccu

SEQ ID NO: 528772 - RNA, 25 nt, Human
ugucggcacagagguugucuucuau

SEQ ID NO: 528773 - RNA, 32 nt, Human
ugucggcaggaugcaggagcugauugggagga

SEQ ID NO: 528774 - RNA, 21 nt, Human
ugucggcaggcuaccugguca

SEQ ID NO: 528775 - RNA, 32 nt, Human
ugucggcaguccugcacuccuucuggaggcuc

SEQ ID NO: 528776 - RNA, 32 nt, Human
ugucggccacugcuggccugagagaggggguc

SEQ ID NO: 528777 - RNA, 24 nt, Human
ugucggccaggcuagagugcagug

SEQ ID NO: 528778 - RNA, 23 nt, Human
ugucggccaggcuggaaugcaau

SEQ ID NO: 528779 - RNA, 24 nt, Human
ugucggccaggcuggaaugcaaug

SEQ ID NO: 528780 - RNA, 23 nt, Human
ugucggccaggcuggagugcagu

SEQ ID NO: 528781 - RNA, 24 nt, Human
ugucggccaggcuggagugcagug

SEQ ID NO: 528782 - RNA, 32 nt, Human
ugucggccauuacggaggcuugaauaagcggu

SEQ ID NO: 528783 - RNA, 32 nt, Human
ugucggcgcuggugggagagaugagggcaauu

SEQ ID NO: 528784 - RNA, 32 nt, Human
ugucggcucacugaaccuccgccucucagguu

SEQ ID NO: 528785 - RNA, 32 nt, Human
ugucggcucacugcaaccugucucucagguug

SEQ ID NO: 528786 - RNA, 32 nt, Human
ugucggcucacugcaacguccgccuccugggu

SEQ ID NO: 528787 - RNA, 32 nt, Human
ugucggcucacugcaagcuccgccuccugggu

SEQ ID NO: 528788 - RNA, 32 nt, Human
ugucggcucacugccaacaucugccacccagg

SEQ ID NO: 528789 - RNA, 32 nt, Human
ugucggcuggggcagagacugaaauacugcca

SEQ ID NO: 528790 - RNA, 18 nt, Human
ugucggcugggugcagug

SEQ ID NO: 528791 - RNA, 32 nt, Human
ugucggcuucaaggaguccagcuuaucuuccu

SEQ ID NO: 528792 - RNA, 32 nt, Human
ugucgggacccucuggacccacccuagcgggc

SEQ ID NO: 528793 - RNA, 32 nt, Human
ugucgggagcuguaucaccuggguucuguccc

SEQ ID NO: 528794 - RNA, 32 nt, Human
ugucgggaggcugaggugggaggaucgcuuga

SEQ ID NO: 528795 - RNA, 32 nt, Human
ugucgggagucgggagucuccacgccguguga

SEQ ID NO: 528796 - RNA, 32 nt, Human
ugucgggauccgcggcagcagcggcugcuuga

SEQ ID NO: 528797 - RNA, 32 nt, Human
ugucgggcaggccgggcuuccgggaggaccug

SEQ ID NO: 528798 - RNA, 32 nt, Human
ugucgggccccggcccucuggagcuucaggag

SEQ ID NO: 528799 - RNA, 32 nt, Human
ugucggggagaaauguugcccaggaaggacag

SEQ ID NO: 528800 - RNA, 32 nt, Human
ugucgggguccagguggcacucaugggccccc

SEQ ID NO: 528801 - RNA, 32 nt, Human
ugucgggguuggcagggcaggcuuccuggagg

SEQ ID NO: 528802 - RNA, 32 nt, Human
ugucgggugggauguugagcaccugcauggga

SEQ ID NO: 528803 - RNA, 32 nt, Human
ugucggucuccaggagguugugcaugcugguu

SEQ ID NO: 528804 - RNA, 22 nt, Human
ugucggugccacccccaugcug

SEQ ID NO: 528805 - RNA, 32 nt, Human
ugucggugcucugcagggggaaauccaacaac

SEQ ID NO: 528806 - RNA, 32 nt, Human
ugucgucacaugccacauccacacacuucuua

SEQ ID NO: 528807 - RNA, 32 nt, Human
ugucgucagccugggagccuuccccaguguaa

SEQ ID NO: 528808 - RNA, 32 nt, Human
ugucguccacccuguauccugugucugagugu

SEQ ID NO: 528809 - RNA, 23 nt, Human
ugucguccaggcuggagugcagu

SEQ ID NO: 528810 - RNA, 24 nt, Human
ugucguccaggcuggagugcagug

SEQ ID NO: 528811 - RNA, 23 nt, Human
ugucguccagguuagagugcaau

SEQ ID NO: 528812 - RNA, 24 nt, Human
ugucguccagguuagagugcaaug

SEQ ID NO: 528813 - RNA, 32 nt, Human
ugucgucccuccucagcuucuuguuccuggga

SEQ ID NO: 528814 - RNA, 32 nt, Human
ugucguccguuucgggaaaaaguucuugcaua

SEQ ID NO: 528815 - RNA, 32 nt, Human
ugucguccuacccuuuuccuccaaaacaaaaa

SEQ ID NO: 528816 - RNA, 32 nt, Human
ugucguccuguccuuccuaucuccccaaagua

SEQ ID NO: 528817 - RNA, 32 nt, Human
ugucgucuacuuaagacuucuggucauuucca

SEQ ID NO: 528818 - RNA, 32 nt, Human
ugucgucuaucagcuaugugggcugcucccuc

SEQ ID NO: 528819 - RNA, 32 nt, Human
ugucgucucagccuguugguuucuccucauug

SEQ ID NO: 528820 - RNA, 24 nt, Human
ugucgucuuugacucaaguaccaa

SEQ ID NO: 528821 - RNA, 32 nt, Human
ugucgugcagugcguggugggaagagaugcca

SEQ ID NO: 528822 - RNA, 32 nt, Human
ugucguggaggaaccuagcaccugccauccuc

SEQ ID NO: 528823 - RNA, 32 nt, Human
ugucguggcacacaccuguaaucccagcuauu

SEQ ID NO: 528824 - RNA, 32 nt, Human
ugucguggcuccuugauuugaaguaaacauuu

SEQ ID NO: 528825 - RNA, 32 nt, Human
ugucgugggaggaucaugugagccugggaggu

SEQ ID NO: 528826 - RNA, 32 nt, Human
ugucguggugugcgccuguaaucucagcuacu

SEQ ID NO: 528827 - RNA, 32 nt, Human
ugucgugguuccugccuuucccagacgaccgu

SEQ ID NO: 528828 - RNA, 32 nt, Human
ugucgugucucccucccuccauggcccgggag

SEQ ID NO: 528829 - RNA, 32 nt, Human
ugucguguucucugcugcucagcccuacuggg

SEQ ID NO: 528830 - RNA, 32 nt, Human
ugucguguugaacugugucugugucagugcac

SEQ ID NO: 528831 - RNA, 31 nt, Human
ugucguucauucaaggagaguugagauacag

SEQ ID NO: 528832 - RNA, 32 nt, Human
ugucguucauucaaggagaguugagauacagu

SEQ ID NO: 528833 - RNA, 32 nt, Human
ugucguugggggaggaagugacccuuccugua

SEQ ID NO: 528834 - RNA, 32 nt, Human
ugucguuucuguuccuccuccucucucucuuu

SEQ ID NO: 528835 - RNA, 32 nt, Human
ugucuaaacuccaggauacaguauccaauuua

SEQ ID NO: 528836 - RNA, 32 nt, Human
ugucuaaagauggaacaucuugaagcauuuug

SEQ ID NO: 528837 - RNA, 32 nt, Human
ugucuaacacggugaaaccccaucucuacuaa

SEQ ID NO: 528838 - RNA, 32 nt, Human
ugucuaacauauuaugcacagacaagcuccug

SEQ ID NO: 528839 - RNA, 32 nt, Human
ugucuaagagccuguuuuggaaacacaagcug

SEQ ID NO: 528840 - RNA, 32 nt, Human
ugucuaagcucaggaggaaagggacccuccca

SEQ ID NO: 528841 - RNA, 32 nt, Human
ugucuaagugcuagacaugcucagcuuugugg

SEQ ID NO: 528842 - RNA, 32 nt, Human
ugucuacaccgcacugccauccaggcugugag

SEQ ID NO: 528843 - RNA, 31 nt, Human
ugucuacaccucucugggccuuggugucguc

SEQ ID NO: 528844 - RNA, 28 nt, Human
ugucuacagcugcuugcugagcucauca

SEQ ID NO: 528845 - RNA, 32 nt, Human
ugucuacagcuuucacaccaggcugccccucu

SEQ ID NO: 528846 - RNA, 32 nt, Human
ugucuacaggcaggaaaaccaggauggagaag

SEQ ID NO: 528847 - RNA, 32 nt, Human
ugucuacaucauaccuguggcuccagaagcuc

SEQ ID NO: 528848 - RNA, 32 nt, Human
ugucuacaugaagcucacaggcaaggauauaa

SEQ ID NO: 528849 - RNA, 32 nt, Human
ugucuaccaguagcgguccuugcccauuuggg

SEQ ID NO: 528850 - RNA, 32 nt, Human
ugucuaccguuuucagugcugugugaucauau

SEQ ID NO: 528851 - RNA, 32 nt, Human
ugucuaccuauguuauguuaaugauaucucua

SEQ ID NO: 528852 - RNA, 32 nt, Human
ugucuaccucaccaaccucgcucaucauuugg

SEQ ID NO: 528853 - RNA, 32 nt, Human
ugucuacgcacacccuauuugugcuuugcggg

SEQ ID NO: 528854 - RNA, 32 nt, Human
ugucuacuaaaaauacaaaauuagcugggcgu

SEQ ID NO: 528855 - RNA, 32 nt, Human
ugucuacucccccaaagacaaugaguuaaggg

SEQ ID NO: 528856 - RNA, 32 nt, Human
ugucuacuguaaccugcagucacugggccagg

SEQ ID NO: 528857 - RNA, 32 nt, Human
ugucuacugucggacucuacaggccagccucu

SEQ ID NO: 528858 - RNA, 32 nt, Human
ugucuacuguuggacucuacaggccagccucu

SEQ ID NO: 528859 - RNA, 32 nt, Human
ugucuacuucaauaagggucucuaaugcccca

SEQ ID NO: 528860 - RNA, 32 nt, Human
ugucuacuuucuucuccauccugcuuuaaaac

SEQ ID NO: 528861 - RNA, 32 nt, Human
ugucuagagguaaaauacgcuuuugccauuuc

SEQ ID NO: 528862 - RNA, 32 nt, Human
ugucuagagugugggcuggcuguugugcugga

SEQ ID NO: 528863 - RNA, 32 nt, Human
ugucuagccacucccucccagaaaaacuggcu

SEQ ID NO: 528864 - RNA, 32 nt, Human
ugucuaggaaacuguugagauucaaaggaauc

SEQ ID NO: 528865 - RNA, 32 nt, Human
ugucuaggauccuuuuaucaaggcaguuauga

SEQ ID NO: 528866 - RNA, 32 nt, Human
ugucuaggcaggcaagagaauugaaaugaggu

SEQ ID NO: 528867 - RNA, 32 nt, Human
ugucuaggcuacaacaggauucuagguggagg

SEQ ID NO: 528868 - RNA, 21 nt, Human
ugucuaggcuggagugccgug

SEQ ID NO: 528869 - RNA, 32 nt, Human
ugucuagggcaaacuguggcccccaggagaca

SEQ ID NO: 528870 - RNA, 32 nt, Human
ugucuaguagacaugucuaaaguucaaacuuu

SEQ ID NO: 528871 - RNA, 32 nt, Human
ugucuagucaugccuccuuccaccucccuccc

SEQ ID NO: 528872 - RNA, 32 nt, Human
ugucuauaagggcagagcauuaucuauaacgu

SEQ ID NO: 528873 - RNA, 32 nt, Human
ugucuauagagcaguuuacagacuugugucuu

SEQ ID NO: 528874 - RNA, 32 nt, Human
ugucuauccuccacuuuuaccauauucuguaa

SEQ ID NO: 528875 - RNA, 32 nt, Human
ugucuaucgggucauuugggaaugggcaggau

SEQ ID NO: 528876 - RNA, 30 nt, Human
ugucuaucuuguauaucagaaagauuaucu

SEQ ID NO: 528877 - RNA, 32 nt, Human
ugucuaucuuucucauuaauguucuuuagccu

SEQ ID NO: 528878 - RNA, 32 nt, Human
ugucuaucuuuguuucucucaccugagagaaa

SEQ ID NO: 528879 - RNA, 32 nt, Human
ugucuaugacugagcccaauugccuguugccu

SEQ ID NO: 528880 - RNA, 32 nt, Human
ugucuaugagucuaaacggggguucugaugcu

SEQ ID NO: 528881 - RNA, 32 nt, Human
ugucuaugcacaggugugaguccucuguuugc

SEQ ID NO: 528882 - RNA, 32 nt, Human
ugucuaugcaggauucuaagaugaggaaaauu

SEQ ID NO: 528883 - RNA, 32 nt, Human
ugucuauggcccccagccccagccucuggaaa

SEQ ID NO: 528884 - RNA, 32 nt, Human
ugucuauguaaaccuggaaguagucuacuuuu

SEQ ID NO: 528885 - RNA, 32 nt, Human
ugucuauguguguguuucagcacuuuguaaau

SEQ ID NO: 528886 - RNA, 32 nt, Human
ugucuauucucugagugucacguuccucaccu

SEQ ID NO: 528887 - RNA, 32 nt, Human
ugucuauugcccaggcuggagugcaguggugc

SEQ ID NO: 528888 - RNA, 32 nt, Human
ugucucaaacaugcuucuuuauuacucuguua

SEQ ID NO: 528889 - RNA, 32 nt, Human
ugucucaaagaaagaaagaaagaaaagaaaga

SEQ ID NO: 528890 - RNA, 32 nt, Human
ugucucaaagaaggguagaaguucuaaugucu

SEQ ID NO: 528891 - RNA, 22 nt, Human
ugucucaaagugcugggauuac

SEQ ID NO: 528892 - RNA, 32 nt, Human
ugucucaaagugcugggauuacagguaugagc

SEQ ID NO: 528893 - RNA, 32 nt, Human
ugucucaaccaccaccaccaccaccaccccua

SEQ ID NO: 528894 - RNA, 22 nt, Human
ugucucaacuaaaaauacaaaa

SEQ ID NO: 528895 - RNA, 32 nt, Human
ugucucaacuaauaauacaaaauuagccaggc

SEQ ID NO: 528896 - RNA, 32 nt, Human
ugucucaagauuguauaugaaggaggcuuuuc

SEQ ID NO: 528897 - RNA, 32 nt, Human
ugucucaagccuauaaucccagcacuuuggga

SEQ ID NO: 528898 - RNA, 21 nt, Human
ugucucaagccuguaauccua

SEQ ID NO: 528899 - RNA, 32 nt, Human
ugucucaagccuguaauccuagcacuuuggga

SEQ ID NO: 528900 - RNA, 32 nt, Human
ugucucaaugagaggggagacagaggcagcua

SEQ ID NO: 528901 - RNA, 32 nt, Human
ugucucacacagaacaauacaaacauguaaaa

SEQ ID NO: 528902 - RNA, 21 nt, Human
ugucucacaccuguaauccca

SEQ ID NO: 528903 - RNA, 32 nt, Human
ugucucacaccuguaaucccagcacuuugaga

SEQ ID NO: 528904 - RNA, 32 nt, Human
ugucucacaccuguaaucccagcacuuuggga

SEQ ID NO: 528905 - RNA, 32 nt, Human
ugucucacaccuguaaucccagcacuuugggu

SEQ ID NO: 528906 - RNA, 32 nt, Human
ugucucacccaggcuggagugcaguggcacga

SEQ ID NO: 528907 - RNA, 32 nt, Human
ugucucacuacccucagccuaggccaaccugg

SEQ ID NO: 528908 - RNA, 32 nt, Human
ugucucacuccccucugaccuccagaccagau

SEQ ID NO: 528909 - RNA, 32 nt, Human
ugucucacuccuguaauaccagcacuuuggga

SEQ ID NO: 528910 - RNA, 32 nt, Human
ugucucacugcaaccucugccucccggguuca

SEQ ID NO: 528911 - RNA, 23 nt, Human
ugucucagacauugucuccuccu

SEQ ID NO: 528912 - RNA, 32 nt, Human
ugucucagagcagccuuugccccagggaaaug

SEQ ID NO: 528913 - RNA, 32 nt, Human
ugucucagagcccagagccaggggagccagag

SEQ ID NO: 528914 - RNA, 32 nt, Human
ugucucagaggaggggacggcagcaccaugga

SEQ ID NO: 528915 - RNA, 32 nt, Human
ugucucagcccaggaaccaggcuuugcugagg

SEQ ID NO: 528916 - RNA, 32 nt, Human
ugucucagccuccugaguagcuaggacuacag

SEQ ID NO: 528917 - RNA, 32 nt, Human
ugucucagccuccugaguagcugagauuacag

SEQ ID NO: 528918 - RNA, 32 nt, Human
ugucucagccuccugaguagcugggauuauag

SEQ ID NO: 528919 - RNA, 32 nt, Human
ugucucagccuccugaguagcugggauuaugg

SEQ ID NO: 528920 - RNA, 32 nt, Human
ugucucagccuccuggguagcugggauuacag

SEQ ID NO: 528921 - RNA, 32 nt, Human
ugucucagcucacugcaaccuccgccucccag

SEQ ID NO: 528922 - RNA, 32 nt, Human
ugucucagcucuuguucugugccugagaaugg

SEQ ID NO: 528923 - RNA, 32 nt, Human
ugucucaggagcaaaccagccuuggcuuucag

SEQ ID NO: 528924 - RNA, 21 nt, Human
ugucucaggccuguaauccca

SEQ ID NO: 528925 - RNA, 32 nt, Human
ugucucaggcgggcugggcugcagccuucugu

SEQ ID NO: 528926 - RNA, 22 nt, Human
ugucucaggcuggaguacagug

SEQ ID NO: 528927 - RNA, 32 nt, Human
ugucucaggcuggaguacaguggugcaauugu

SEQ ID NO: 528928 - RNA, 32 nt, Human
ugucucaggcugguaguuagcaguugugacca

SEQ ID NO: 528929 - RNA, 32 nt, Human
ugucucaguucugcuugaauaccuccaucgau

SEQ ID NO: 528930 - RNA, 32 nt, Human
ugucucauaugcaaacaaagcaugucuguguc

SEQ ID NO: 528931 - RNA, 32 nt, Human
ugucucaucagcugccaccagcacucacucca

SEQ ID NO: 528932 - RNA, 32 nt, Human
ugucucaucuuugaagaaaaguauuuaagugg

SEQ ID NO: 528933 - RNA, 32 nt, Human
ugucucaugcacugaaugcaacauggacacaa

SEQ ID NO: 528934 - RNA, 21 nt, Human
ugucucaugccucuaauccca

SEQ ID NO: 528935 - RNA, 32 nt, Human
ugucucaugccucuaaucccagcacuuuggaa

SEQ ID NO: 528936 - RNA, 21 nt, Human
ugucucaugccuguaauccca

SEQ ID NO: 528937 - RNA, 32 nt, Human
ugucucaugccuguaaucccagcacuuuggga

SEQ ID NO: 528938 - RNA, 21 nt, Human
ugucucaugcucuuucuuccu

SEQ ID NO: 528939 - RNA, 32 nt, Human
ugucucauugccagugguguccaagggccccc

SEQ ID NO: 528940 - RNA, 32 nt, Human
ugucucauugcccaggcuggucucaaacuccu

SEQ ID NO: 528941 - RNA, 31 nt, Human
ugucuccaaaguccuuguuguaggaguugcu

SEQ ID NO: 528942 - RNA, 32 nt, Human
ugucuccaauccagacggagaugccaggcaca

SEQ ID NO: 528943 - RNA, 32 nt, Human
ugucuccaaugccagcacauuugugacuugua

SEQ ID NO: 528944 - RNA, 32 nt, Human
ugucuccacagagcagcuugggcacagcagac

SEQ ID NO: 528945 - RNA, 32 nt, Human
ugucuccacagcaaccagccacugcaggcagc

SEQ ID NO: 528946 - RNA, 22 nt, Human
ugucuccaccaaaaauacaaaa

SEQ ID NO: 528947 - RNA, 23 nt, Human
ugucuccacuaaaaaauacaaaa

SEQ ID NO: 528948 - RNA, 22 nt, Human
ugucuccacuaaaaacacaaaa

SEQ ID NO: 528949 - RNA, 22 nt, Human
ugucuccacuaaaaauacaaaa

SEQ ID NO: 528950 - RNA, 32 nt, Human
ugucuccacuaaaaauacaaaaauuagccggg

SEQ ID NO: 528951 - RNA, 32 nt, Human
ugucuccacuaaaaauacaaaauuagccgggu

SEQ ID NO: 528952 - RNA, 22 nt, Human
ugucuccacugaaaauacaaaa

SEQ ID NO: 528953 - RNA, 32 nt, Human
ugucuccacugcauucuccagagguaaagauu

SEQ ID NO: 528954 - RNA, 32 nt, Human
ugucuccacuucacuccagcaucaacaagugg

SEQ ID NO: 528955 - RNA, 32 nt, Human
ugucuccacuucagaaagaaagcaagaggcac

SEQ ID NO: 528956 - RNA, 20 nt, Human
ugucuccagcacuaugcauc

SEQ ID NO: 528957 - RNA, 32 nt, Human
ugucuccagccugcccacuucccuucaugaau

SEQ ID NO: 528958 - RNA, 32 nt, Human
ugucuccagcuuccagcccuccuccccuaagc

SEQ ID NO: 528959 - RNA, 22 nt, Human
ugucuccaggcuggagugcagu

SEQ ID NO: 528960 - RNA, 23 nt, Human
ugucuccaggcuggagugcagug

SEQ ID NO: 528961 - RNA, 32 nt, Human
ugucuccauccucugcugaugccugcugucuu

SEQ ID NO: 528962 - RNA, 32 nt, Human
ugucuccauggaugacguccagaaggauguca

SEQ ID NO: 528963 - RNA, 19 nt, Human
ugucuccauuccugccauc

SEQ ID NO: 528964 - RNA, 32 nt, Human
ugucucccaaagagcugggauuacaggcguga

SEQ ID NO: 528965 - RNA, 32 nt, Human
ugucucccaaagugcuaggauuacagguguga

SEQ ID NO: 528966 - RNA, 32 nt, Human
ugucucccaaagugcugggaugccaggcguga

SEQ ID NO: 528967 - RNA, 32 nt, Human
ugucucccaaguagcuggaacuacaggcaugc

SEQ ID NO: 528968 - RNA, 24 nt, Human
ugucucccagaacuauucuggggg

SEQ ID NO: 528969 - RNA, 32 nt, Human
ugucucccagcagacugguggcaugcccagug

SEQ ID NO: 528970 - RNA, 32 nt, Human
ugucucccagcccacauaggaggucugggcag

SEQ ID NO: 528971 - RNA, 32 nt, Human
ugucucccagcucccaccccagccacugauga

SEQ ID NO: 528972 - RNA, 23 nt, Human
ugucucccaggccggagugcagu

SEQ ID NO: 528973 - RNA, 24 nt, Human
ugucucccaggccggagugcagug

SEQ ID NO: 528974 - RNA, 24 nt, Human
ugucucccaggcuagaguaccgug

SEQ ID NO: 528975 - RNA, 23 nt, Human
ugucucccaggcuagagugcaau

SEQ ID NO: 528976 - RNA, 24 nt, Human
ugucucccaggcuagagugcaaug

SEQ ID NO: 528977 - RNA, 23 nt, Human
ugucucccaggcugaagugcagu

SEQ ID NO: 528978 - RNA, 24 nt, Human
ugucucccaggcugaagugcagug

SEQ ID NO: 528979 - RNA, 32 nt, Human
ugucucccaggcugaagugcagugagucaaga

SEQ ID NO: 528980 - RNA, 32 nt, Human
ugucucccaggcugcuggagugcaguggcaca

SEQ ID NO: 528981 - RNA, 22 nt, Human
ugucucccaggcuggacugcag

SEQ ID NO: 528982 - RNA, 24 nt, Human
ugucucccaggcuggacugcagug

SEQ ID NO: 528983 - RNA, 23 nt, Human
ugucucccaggcuggagcguagu

SEQ ID NO: 528984 - RNA, 32 nt, Human
ugucucccaggcuggaggucaguggcacaaau

SEQ ID NO: 528985 - RNA, 19 nt, Human
ugucucccaggcuggagua

SEQ ID NO: 528986 - RNA, 24 nt, Human
ugucucccaggcuggaguacagug

SEQ ID NO: 528987 - RNA, 20 nt, Human
ugucucccaggcuggagugc

SEQ ID NO: 528988 - RNA, 21 nt, Human
ugucucccaggcuggagugca

SEQ ID NO: 528989 - RNA, 23 nt, Human
ugucucccaggcuggagugcaau

SEQ ID NO: 528990 - RNA, 24 nt, Human
ugucucccaggcuggagugcaaug

SEQ ID NO: 528991 - RNA, 23 nt, Human
ugucucccaggcuggagugcagu

SEQ ID NO: 528992 - RNA, 24 nt, Human
ugucucccaggcuggagugcagug

SEQ ID NO: 528993 - RNA, 24 nt, Human
ugucucccaggcuggagugcggug

SEQ ID NO: 528994 - RNA, 24 nt, Human
ugucucccaggcuggagugcuaug

SEQ ID NO: 528995 - RNA, 24 nt, Human
ugucucccagguuggagugcagug

SEQ ID NO: 528996 - RNA, 32 nt, Human
ugucucccaguucuagagguucccagagaaga

SEQ ID NO: 528997 - RNA, 32 nt, Human
ugucuccccacacauccgaugugcuucucccu

SEQ ID NO: 528998 - RNA, 32 nt, Human
ugucucccccagcugccacacacacauuuugu

SEQ ID NO: 528999 - RNA, 24 nt, Human
ugucuccccggcuggagugcagug

SEQ ID NO: 529000 - RNA, 32 nt, Human
ugucuccccugccccacugcuggaacagaggc

SEQ ID NO: 529001 - RNA, 32 nt, Human
ugucucccgaguaguuggaauuacaggugcau

SEQ ID NO: 529002 - RNA, 32 nt, Human
ugucucccgguuccuuucucucugcuccugac

SEQ ID NO: 529003 - RNA, 32 nt, Human
ugucucccuagagguacuaguaucuagaguuu

SEQ ID NO: 529004 - RNA, 32 nt, Human
ugucucccuccagagccucccuccggacaaug

SEQ ID NO: 529005 - RNA, 32 nt, Human
ugucucccucccuguucucugccucuuguacc

SEQ ID NO: 529006 - RNA, 21 nt, Human
ugucucccuccucugccccca

SEQ ID NO: 529007 - RNA, 32 nt, Human
ugucucccucucucacacacacaagagcaguu

SEQ ID NO: 529008 - RNA, 32 nt, Human
ugucucccugcuccucuacuggugaugggcua

SEQ ID NO: 529009 - RNA, 32 nt, Human
ugucucccugcucgcuccgggucccggcgccg

SEQ ID NO: 529010 - RNA, 32 nt, Human
ugucucccuugccucuggcccagcagagccua

SEQ ID NO: 529011 - RNA, 32 nt, Human
ugucuccgcacguguugggccacagcaaggcg

SEQ ID NO: 529012 - RNA, 32 nt, Human
ugucuccgcugccuccuucuccacuucuacaa

SEQ ID NO: 529013 - RNA, 32 nt, Human
ugucuccggagucucugaagcuguaguuguac

SEQ ID NO: 529014 - RNA, 32 nt, Human
ugucuccggggugcccugaccaaccugcccgc

SEQ ID NO: 529015 - RNA, 23 nt, Human
ugucuccuaagcuggagugcagu

SEQ ID NO: 529016 - RNA, 24 nt, Human
ugucuccuaagcuggagugcagug

SEQ ID NO: 529017 - RNA, 32 nt, Human
ugucuccuaagcuggagugcaguggcaucauc

SEQ ID NO: 529018 - RNA, 32 nt, Human
ugucuccuaagugcccucagacagcagugacg

SEQ ID NO: 529019 - RNA, 32 nt, Human
ugucuccuacuauccaaaaugugcaucacagg

SEQ ID NO: 529020 - RNA, 32 nt, Human
ugucuccuacuucauucggaacauggaggagu

SEQ ID NO: 529021 - RNA, 23 nt, Human
ugucuccuaggcuggagugcagu

SEQ ID NO: 529022 - RNA, 24 nt, Human
ugucuccuaggcuggagugcagug

SEQ ID NO: 529023 - RNA, 23 nt, Human
ugucuccuaggguuauccugcuc

SEQ ID NO: 529024 - RNA, 23 nt, Human
ugucuccucacccacccccagcc

SEQ ID NO: 529025 - RNA, 23 nt, Human
ugucuccucacccccagcugcca

SEQ ID NO: 529026 - RNA, 21 nt, Human
ugucuccucagcugcucacca

SEQ ID NO: 529027 - RNA, 32 nt, Human
ugucuccucagggcagggcccagcacacugcc

SEQ ID NO: 529028 - RNA, 32 nt, Human
ugucuccuccacucuccuccucacccucucgc

SEQ ID NO: 529029 - RNA, 23 nt, Human
ugucuccuccagggccccagcca

SEQ ID NO: 529030 - RNA, 32 nt, Human
ugucuccuccagguacccccuaagccugcacu

SEQ ID NO: 529031 - RNA, 22 nt, Human
ugucuccucccucccaugcucc

SEQ ID NO: 529032 - RNA, 32 nt, Human
ugucuccucccucccaugcuccuuggcuucug

SEQ ID NO: 529033 - RNA, 23 nt, Human
ugucuccucccugcugugcuucc

SEQ ID NO: 529034 - RNA, 32 nt, Human
ugucuccuccggggacccagacugccuucauc

SEQ ID NO: 529035 - RNA, 20 nt, Human
ugucuccuccuagugcuucc

SEQ ID NO: 529036 - RNA, 31 nt, Human
ugucuccuccucucuguguccacuguccuga

SEQ ID NO: 529037 - RNA, 32 nt, Human
ugucuccucugcagaggcggauuucccugacu

SEQ ID NO: 529038 - RNA, 32 nt, Human
ugucuccucugcccagaggggcagcagcucuc

SEQ ID NO: 529039 - RNA, 32 nt, Human
ugucuccugcagcucagcagcugccuucacca

SEQ ID NO: 529040 - RNA, 32 nt, Human
ugucuccugcauauccagccuccugcgacucc

SEQ ID NO: 529041 - RNA, 32 nt, Human
ugucuccugccucugucuuucuuggugucugu

SEQ ID NO: 529042 - RNA, 32 nt, Human
ugucuccugccuguaaucccaucacuuuggga

SEQ ID NO: 529043 - RNA, 32 nt, Human
ugucuccugcucuucuggagccuggaaggaaa

SEQ ID NO: 529044 - RNA, 32 nt, Human
ugucuccugcuuggaaagucucucuucugaac

SEQ ID NO: 529045 - RNA, 32 nt, Human
ugucuccuggccgucugcuccaggcgcagcug

SEQ ID NO: 529046 - RNA, 32 nt, Human
ugucuccugggcuguggucucaucucaacguu

SEQ ID NO: 529047 - RNA, 32 nt, Human
ugucuccuggggacuuugccuacuggggaccu

SEQ ID NO: 529048 - RNA, 23 nt, Human
ugucuccugggucccugccccca

SEQ ID NO: 529049 - RNA, 32 nt, Human
ugucuccugguucaggaacacucucucaggag

SEQ ID NO: 529050 - RNA, 32 nt, Human
ugucuccugugggcagcgcucaggaccacccu

SEQ ID NO: 529051 - RNA, 24 nt, Human
ugucuccuuccacaguuuacuucc

SEQ ID NO: 529052 - RNA, 32 nt, Human
ugucuccuuccauuaucccucuccuucccucc

SEQ ID NO: 529053 - RNA, 22 nt, Human
ugucuccuucccccacucaucc

SEQ ID NO: 529054 - RNA, 32 nt, Human
ugucuccuucugcacccagaguagggguggag

SEQ ID NO: 529055 - RNA, 32 nt, Human
ugucuccuuugcaggcucauagggaagaccug

SEQ ID NO: 529056 - RNA, 32 nt, Human
ugucuccuuuggcugaggagaguguccuggcc

SEQ ID NO: 529057 - RNA, 21 nt, Human
ugucuccuuuucaugugaauu

SEQ ID NO: 529058 - RNA, 32 nt, Human
ugucucgacucacugcaaccuccgccucccga

SEQ ID NO: 529059 - RNA, 32 nt, Human
ugucucgucuaaaaauacaaaaauuagccggg

SEQ ID NO: 529060 - RNA, 32 nt, Human
ugucucgucuuuccuccuuagaagaacagacc

SEQ ID NO: 529061 - RNA, 32 nt, Human
ugucucuaagaggugcugccccaaagcucccc

SEQ ID NO: 529062 - RNA, 32 nt, Human
ugucucuaaggguggccccuccucucaggcgu

SEQ ID NO: 529063 - RNA, 22 nt, Human
ugucucuaauaaaaauacaaaa

SEQ ID NO: 529064 - RNA, 32 nt, Human
ugucucuaauaaaaauacaaaaauuagccagg

SEQ ID NO: 529065 - RNA, 32 nt, Human
ugucucuaauaaaaauacgaaaaauuagcugg

SEQ ID NO: 529066 - RNA, 32 nt, Human
ugucucuaauguccuuugcaccacugaccuug

SEQ ID NO: 529067 - RNA, 22 nt, Human
ugucucuacaaaaaauacaaaa

SEQ ID NO: 529068 - RNA, 32 nt, Human
ugucucuacaaaaaguagaaaaauuagcugag

SEQ ID NO: 529069 - RNA, 32 nt, Human
ugucucuacaaaacauacaaaaauuagcugag

SEQ ID NO: 529070 - RNA, 22 nt, Human
ugucucuacagaaaauacaaaa

SEQ ID NO: 529071 - RNA, 32 nt, Human
ugucucuacagaaaguuuuaaaauuagccagg

SEQ ID NO: 529072 - RNA, 32 nt, Human
ugucucuacagaagauacaaaaauuggcuggg

SEQ ID NO: 529073 - RNA, 22 nt, Human
ugucucuacauaaaauacaaaa

SEQ ID NO: 529074 - RNA, 32 nt, Human
ugucucuacauaaaauacaaaaacuuagaugg

SEQ ID NO: 529075 - RNA, 32 nt, Human
ugucucuacauaaaauacaaaaauuagcuggg

SEQ ID NO: 529076 - RNA, 21 nt, Human
ugucucuaccaaaaaauaaaa

SEQ ID NO: 529077 - RNA, 32 nt, Human
ugucucuaccaaaaacacacaaagaaauuagc

SEQ ID NO: 529078 - RNA, 22 nt, Human
ugucucuaccaaaaauaaaaaa

SEQ ID NO: 529079 - RNA, 22 nt, Human
ugucucuaccaaaaauacaaaa

SEQ ID NO: 529080 - RNA, 32 nt, Human
ugucucuaccaaaaauacaaaaauuagccacg

SEQ ID NO: 529081 - RNA, 32 nt, Human
ugucucuaccaaaaauacaaaaauuagccagg

SEQ ID NO: 529082 - RNA, 32 nt, Human
ugucucuaccaaaaauacaaaaauuagccggg

SEQ ID NO: 529083 - RNA, 32 nt, Human
ugucucuaccaaaaauacaaaaauuagcuaga

SEQ ID NO: 529084 - RNA, 32 nt, Human
ugucucuaccaaaaauacaaaaauuagcuggg

SEQ ID NO: 529085 - RNA, 22 nt, Human
ugucucuaccaaaaauacaaga

SEQ ID NO: 529086 - RNA, 22 nt, Human
ugucucuaccaaaaauacagaa

SEQ ID NO: 529087 - RNA, 32 nt, Human
ugucucuaccaaaauaaaaauuagcugggcau

SEQ ID NO: 529088 - RNA, 21 nt, Human
ugucucuaccaaaauacaaaa

SEQ ID NO: 529089 - RNA, 32 nt, Human
ugucucuaccaaaauacaaaaauuagccgggc

SEQ ID NO: 529090 - RNA, 22 nt, Human
ugucucuaccaaaauuacaaaa

SEQ ID NO: 529091 - RNA, 32 nt, Human
ugucucuaccaaaauuacaaaaauuagccgag

SEQ ID NO: 529092 - RNA, 31 nt, Human
ugucucuaccucucugccugucuccuuccac

SEQ ID NO: 529093 - RNA, 32 nt, Human
ugucucuacgaaaaauagaaaaauuagccaga

SEQ ID NO: 529094 - RNA, 23 nt, Human
ugucucuacuaaaaaauaaaaua

SEQ ID NO: 529095 - RNA, 23 nt, Human
ugucucuacuaaaaaauacaaaa

SEQ ID NO: 529096 - RNA, 24 nt, Human
ugucucuacuaaaaaauacaaaau

SEQ ID NO: 529097 - RNA, 21 nt, Human
ugucucuacuaaaaacacaaa

SEQ ID NO: 529098 - RNA, 22 nt, Human
ugucucuacuaaaaacacaaaa

SEQ ID NO: 529099 - RNA, 32 nt, Human
ugucucuacuaaaaacacaaaaauuagccagg

SEQ ID NO: 529100 - RNA, 32 nt, Human
ugucucuacuaaaaacacaaaaauuagcugag

SEQ ID NO: 529101 - RNA, 32 nt, Human
ugucucuacuaaaaacacaaaaauuagcuggg

SEQ ID NO: 529102 - RNA, 32 nt, Human
ugucucuacuaaaaacacaaaaauuaucuggg

SEQ ID NO: 529103 - RNA, 32 nt, Human
ugucucuacuaaaaacacaaacauuagccggg

SEQ ID NO: 529104 - RNA, 22 nt, Human
ugucucuacuaaaaacauaaaa

SEQ ID NO: 529105 - RNA, 32 nt, Human
ugucucuacuaaaaacauaaaaauuagcuggg

SEQ ID NO: 529106 - RNA, 32 nt, Human
ugucucuacuaaaaacauggaaauuagccaag

SEQ ID NO: 529107 - RNA, 23 nt, Human
ugucucuacuaaaaacuacaaaa

SEQ ID NO: 529108 - RNA, 22 nt, Human
ugucucuacuaaaaagacaaaa

SEQ ID NO: 529109 - RNA, 22 nt, Human
ugucucuacuaaaaauaaaaaa

SEQ ID NO: 529110 - RNA, 32 nt, Human
ugucucuacuaaaaauaaaauuagccaggugc

SEQ ID NO: 529111 - RNA, 19 nt, Human
ugucucuacuaaaaauaca

SEQ ID NO: 529112 - RNA, 20 nt, Human
ugucucuacuaaaaauacaa

SEQ ID NO: 529113 - RNA, 22 nt, Human
ugucucuacuaaaaauacaaaa

SEQ ID NO: 529114 - RNA, 32 nt, Human
ugucucuacuaaaaauacaaaaacuagccugg

SEQ ID NO: 529115 - RNA, 32 nt, Human
ugucucuacuaaaaauacaaaaagccaggugu

SEQ ID NO: 529116 - RNA, 32 nt, Human
ugucucuacuaaaaauacaaaaaguagccagc

SEQ ID NO: 529117 - RNA, 32 nt, Human
ugucucuacuaaaaauacaaaaaguagccagg

SEQ ID NO: 529118 - RNA, 32 nt, Human
ugucucuacuaaaaauacaaaaaucagccggg

SEQ ID NO: 529119 - RNA, 32 nt, Human
ugucucuacuaaaaauacaaaaaugagccggg

SEQ ID NO: 529120 - RNA, 32 nt, Human
ugucucuacuaaaaauacaaaaaugagcuggg

SEQ ID NO: 529121 - RNA, 32 nt, Human
ugucucuacuaaaaauacaaaaauuagauggg

SEQ ID NO: 529122 - RNA, 32 nt, Human
ugucucuacuaaaaauacaaaaauuagcagag

SEQ ID NO: 529123 - RNA, 32 nt, Human
ugucucuacuaaaaauacaaaaauuagccaga

SEQ ID NO: 529124 - RNA, 32 nt, Human
ugucucuacuaaaaauacaaaaauuagccagg

SEQ ID NO: 529125 - RNA, 32 nt, Human
ugucucuacuaaaaauacaaaaauuagcccga

SEQ ID NO: 529126 - RNA, 32 nt, Human
ugucucuacuaaaaauacaaaaauuagccgag

SEQ ID NO: 529127 - RNA, 32 nt, Human
ugucucuacuaaaaauacaaaaauuagccggc

SEQ ID NO: 529128 - RNA, 32 nt, Human
ugucucuacuaaaaauacaaaaauuagccggg

SEQ ID NO: 529129 - RNA, 32 nt, Human
ugucucuacuaaaaauacaaaaauuagccugg

SEQ ID NO: 529130 - RNA, 32 nt, Human
ugucucuacuaaaaauacaaaaauuagcugau

SEQ ID NO: 529131 - RNA, 32 nt, Human
ugucucuacuaaaaauacaaaaauuagcugca

SEQ ID NO: 529132 - RNA, 32 nt, Human
ugucucuacuaaaaauacaaaaauuagcuggg

SEQ ID NO: 529133 - RNA, 32 nt, Human
ugucucuacuaaaaauacaaaaauuaggccgg

SEQ ID NO: 529134 - RNA, 32 nt, Human
ugucucuacuaaaaauacaaaaauuagucggg

SEQ ID NO: 529135 - RNA, 32 nt, Human
ugucucuacuaaaaauacaaaaauuauccagu

SEQ ID NO: 529136 - RNA, 32 nt, Human
ugucucuacuaaaaauacaaaaauuaucuggg

SEQ ID NO: 529137 - RNA, 32 nt, Human
ugucucuacuaaaaauacaaaaauuaugguga

SEQ ID NO: 529138 - RNA, 32 nt, Human
ugucucuacuaaaaauacaaaaauuggccggg

SEQ ID NO: 529139 - RNA, 32 nt, Human
ugucucuacuaaaaauacaaaaauuuagccag

SEQ ID NO: 529140 - RNA, 32 nt, Human
ugucucuacuaaaaauacaaaaauuugccggg

SEQ ID NO: 529141 - RNA, 32 nt, Human
ugucucuacuaaaaauacaaaacuagcugggc

SEQ ID NO: 529142 - RNA, 32 nt, Human
ugucucuacuaaaaauacaaaaguuagcuggg

SEQ ID NO: 529143 - RNA, 23 nt, Human
ugucucuacuaaaaauacaaaau

SEQ ID NO: 529144 - RNA, 32 nt, Human
ugucucuacuaaaaauacaaaaucagccaggc

SEQ ID NO: 529145 - RNA, 32 nt, Human
ugucucuacuaaaaauacaaaauuaacugggu

SEQ ID NO: 529146 - RNA, 32 nt, Human
ugucucuacuaaaaauacaaaauuagccaggc

SEQ ID NO: 529147 - RNA, 32 nt, Human
ugucucuacuaaaaauacaaaauuagccaugc

SEQ ID NO: 529148 - RNA, 32 nt, Human
ugucucuacuaaaaauacaaaauuagcugggc

SEQ ID NO: 529149 - RNA, 32 nt, Human
ugucucuacuaaaaauacaaaauuagcugggu

SEQ ID NO: 529150 - RNA, 32 nt, Human
ugucucuacuaaaaauacaaacauuagcccgg

SEQ ID NO: 529151 - RNA, 22 nt, Human
ugucucuacuaaaaauacaaga

SEQ ID NO: 529152 - RNA, 32 nt, Human
ugucucuacuaaaaauacaagaauuagcuggg

SEQ ID NO: 529153 - RNA, 32 nt, Human
ugucucuacuaaaaauacaaguaaauaagcca

SEQ ID NO: 529154 - RNA, 32 nt, Human
ugucucuacuaaaaauacaauaauuagccagg

SEQ ID NO: 529155 - RNA, 32 nt, Human
ugucucuacuaaaaauacaauuagccaggugu

SEQ ID NO: 529156 - RNA, 22 nt, Human
ugucucuacuaaaaauacagaa

SEQ ID NO: 529157 - RNA, 32 nt, Human
ugucucuacuaaaaauacagaaaaauuagcca

SEQ ID NO: 529158 - RNA, 32 nt, Human
ugucucuacuaaaaauacauaaacuuagccgg

SEQ ID NO: 529159 - RNA, 23 nt, Human
ugucucuacuaaaaauaccaaaa

SEQ ID NO: 529160 - RNA, 32 nt, Human
ugucucuacuaaaaauacgaaaauuagccugg

SEQ ID NO: 529161 - RNA, 22 nt, Human
ugucucuacuaaaaauauaaaa

SEQ ID NO: 529162 - RNA, 32 nt, Human
ugucucuacuaaaaauauaaaaauuagccagg

SEQ ID NO: 529163 - RNA, 32 nt, Human
ugucucuacuaaaaauauaaaaauuaggccag

SEQ ID NO: 529164 - RNA, 32 nt, Human
ugucucuacuaaaaauauaaaaauuagucggg

SEQ ID NO: 529165 - RNA, 23 nt, Human
ugucucuacuaaaaauauaaaau

SEQ ID NO: 529166 - RNA, 32 nt, Human
ugucucuacuaaaaauauaaaaucagccaggc

SEQ ID NO: 529167 - RNA, 32 nt, Human
ugucucuacuaaaaauaugaaaauuagcuggg

SEQ ID NO: 529168 - RNA, 23 nt, Human
ugucucuacuaaaaaucccaaaa

SEQ ID NO: 529169 - RNA, 22 nt, Human
ugucucuacuaaaaaugcaaaa

SEQ ID NO: 529170 - RNA, 32 nt, Human
ugucucuacuaaaaaugcaaaaacuagccggg

SEQ ID NO: 529171 - RNA, 32 nt, Human
ugucucuacuaaaaaugcaaaaauuagccggg

SEQ ID NO: 529172 - RNA, 32 nt, Human
ugucucuacuaaaaaugcaaaaauuagcugga

SEQ ID NO: 529173 - RNA, 23 nt, Human
ugucucuacuaaaaaugcaaaau

SEQ ID NO: 529174 - RNA, 32 nt, Human
ugucucuacuaaaaaugcaaaauuagucaggc

SEQ ID NO: 529175 - RNA, 32 nt, Human
ugucucuacuaaaaauuaaaaauuagcuggac

SEQ ID NO: 529176 - RNA, 23 nt, Human
ugucucuacuaaaaauuacaaaa

SEQ ID NO: 529177 - RNA, 32 nt, Human
ugucucuacuaaaaauuagccaagugugguaa

SEQ ID NO: 529178 - RNA, 22 nt, Human
ugucucuacuaaaaauuuaaaa

SEQ ID NO: 529179 - RNA, 32 nt, Human
ugucucuacuaaaaauuuaaaaauuagcuggg

SEQ ID NO: 529180 - RNA, 25 nt, Human
ugucucuacuaaaacaaauacaaaa

SEQ ID NO: 529181 - RNA, 22 nt, Human
ugucucuacuaaaacgauaaaa

SEQ ID NO: 529182 - RNA, 22 nt, Human
ugucucuacuaaaacuacaaaa

SEQ ID NO: 529183 - RNA, 32 nt, Human
ugucucuacuaaaacuacaaaaauuggccagg

SEQ ID NO: 529184 - RNA, 22 nt, Human
ugucucuacuaaaaguacaaaa

SEQ ID NO: 529185 - RNA, 32 nt, Human
ugucucuacuaaaaguacaaaaauuagccggg

SEQ ID NO: 529186 - RNA, 32 nt, Human
ugucucuacuaaaaguacaaaaauuagcugga

SEQ ID NO: 529187 - RNA, 32 nt, Human
ugucucuacuaaaaguacagaauuagccgggc

SEQ ID NO: 529188 - RNA, 32 nt, Human
ugucucuacuaaaaguaccaaaaugagccaag

SEQ ID NO: 529189 - RNA, 22 nt, Human
ugucucuacuaaaaguauaaaa

SEQ ID NO: 529190 - RNA, 21 nt, Human
ugucucuacuaaaauacaaaa

SEQ ID NO: 529191 - RNA, 32 nt, Human
ugucucuacuaaaauacaaaaauuagcugggc

SEQ ID NO: 529192 - RNA, 22 nt, Human
ugucucuacuaaaauuacaaaa

SEQ ID NO: 529193 - RNA, 32 nt, Human
ugucucuacuaaaauuacaaaaauuagccggc

SEQ ID NO: 529194 - RNA, 32 nt, Human
ugucucuacuaaacauacaaaaauuagcuagg

SEQ ID NO: 529195 - RNA, 22 nt, Human
ugucucuacuaaagauacaaaa

SEQ ID NO: 529196 - RNA, 22 nt, Human
ugucucuacuaaagauauaaaa

SEQ ID NO: 529197 - RNA, 32 nt, Human
ugucucuacuaaagauauaaaaauuagcugga

SEQ ID NO: 529198 - RNA, 22 nt, Human
ugucucuacuaaauauacaaaa

SEQ ID NO: 529199 - RNA, 32 nt, Human
ugucucuacuaaauauacaaaaauuagcuggg

SEQ ID NO: 529200 - RNA, 32 nt, Human
ugucucuacuaaauauacaaaaauuaguuggg

SEQ ID NO: 529201 - RNA, 32 nt, Human
ugucucuacuaacaauauaaaaauuagcuggg

SEQ ID NO: 529202 - RNA, 23 nt, Human
ugucucuacuaagaauacaaaau

SEQ ID NO: 529203 - RNA, 32 nt, Human
ugucucuacuaagaauacaaaauuagcugggc

SEQ ID NO: 529204 - RNA, 32 nt, Human
ugucucuacuaagaauauaaaaauuagcuggg

SEQ ID NO: 529205 - RNA, 23 nt, Human
ugucucuacuaaggauacaaaau

SEQ ID NO: 529206 - RNA, 32 nt, Human
ugucucuacuaaggauacaaaauuagccgggc

SEQ ID NO: 529207 - RNA, 32 nt, Human
ugucucuacuacaaauacaaaaauuagccagg

SEQ ID NO: 529208 - RNA, 32 nt, Human
ugucucuacuacaaauacgaaaauuagcuggg

SEQ ID NO: 529209 - RNA, 32 nt, Human
ugucucuacuaccucagaaacugcagcuuggu

SEQ ID NO: 529210 - RNA, 22 nt, Human
ugucucuacuagaaauacaaaa

SEQ ID NO: 529211 - RNA, 32 nt, Human
ugucucuacuagaaauacaaaaauuagccagg

SEQ ID NO: 529212 - RNA, 32 nt, Human
ugucucuacuauuuagggguugaaaauccauu

SEQ ID NO: 529213 - RNA, 32 nt, Human
ugucucuacuccuuaaacuuguaccacuuuga

SEQ ID NO: 529214 - RNA, 22 nt, Human
ugucucuacugaaaauacaaaa

SEQ ID NO: 529215 - RNA, 32 nt, Human
ugucucuacugaaaauacaaaaauuagccggg

SEQ ID NO: 529216 - RNA, 32 nt, Human
ugucucuacugaaaauacaaaaauuagcuggg

SEQ ID NO: 529217 - RNA, 32 nt, Human
ugucucuacugaaaaugcaaaaauuagccagg

SEQ ID NO: 529218 - RNA, 21 nt, Human
ugucucuacugaaauacaaaa

SEQ ID NO: 529219 - RNA, 32 nt, Human
ugucucuagaaaacauagcuucuuacugaacu

SEQ ID NO: 529220 - RNA, 32 nt, Human
ugucucuagaaaggaauccugucuuaaaacug

SEQ ID NO: 529221 - RNA, 22 nt, Human
ugucucuaguaaaaauacaaaa

SEQ ID NO: 529222 - RNA, 32 nt, Human
ugucucuagugaaaauacaaaaauuagccagg

SEQ ID NO: 529223 - RNA, 22 nt, Human
ugucucuauaaaaaauacaaaa

SEQ ID NO: 529224 - RNA, 22 nt, Human
ugucucuaucaaaaauacaaaa

SEQ ID NO: 529225 - RNA, 32 nt, Human
ugucucuaucaaaaauacaaaaauuagcuggc

SEQ ID NO: 529226 - RNA, 22 nt, Human
ugucucuauuaaaaacacaaaa

SEQ ID NO: 529227 - RNA, 32 nt, Human
ugucucuauuaaaaacacaaaaauuagccaga

SEQ ID NO: 529228 - RNA, 32 nt, Human
ugucucuauuaaaaauaaaaaugauuggccga

SEQ ID NO: 529229 - RNA, 22 nt, Human
ugucucuauuaaaaauacaaaa

SEQ ID NO: 529230 - RNA, 32 nt, Human
ugucucuauuaaaaauacaaaaauuagccagg

SEQ ID NO: 529231 - RNA, 32 nt, Human
ugucucuauuaaaaauacaaaaauuagcuggg

SEQ ID NO: 529232 - RNA, 32 nt, Human
ugucucuauuaaaaauacaaaaauuaggcaug

SEQ ID NO: 529233 - RNA, 32 nt, Human
ugucucuauuaaaaauaccaaaauuagcuggg

SEQ ID NO: 529234 - RNA, 32 nt, Human
ugucucuauuaaaaguacaaaauggagcuggg

SEQ ID NO: 529235 - RNA, 32 nt, Human
ugucucucaaaugaucagacaaagguguuuug

SEQ ID NO: 529236 - RNA, 32 nt, Human
ugucucucagacuguacaugcauuaaaauuuu

SEQ ID NO: 529237 - RNA, 32 nt, Human
ugucucucagcauugcuuuauuacaaaguaaa

SEQ ID NO: 529238 - RNA, 32 nt, Human
ugucucucaggaucaagcugaagugggggaau

SEQ ID NO: 529239 - RNA, 24 nt, Human
ugucucucagucauuccccugggg

SEQ ID NO: 529240 - RNA, 32 nt, Human
ugucucuccagccuuugaagauugggcuccua

SEQ ID NO: 529241 - RNA, 32 nt, Human
ugucucuccauggccugagcagggagauuaua

SEQ ID NO: 529242 - RNA, 32 nt, Human
ugucucuccauuccucuccaacccugcccacc

SEQ ID NO: 529243 - RNA, 32 nt, Human
ugucucucccaagaauacaaaaauuagccagg

SEQ ID NO: 529244 - RNA, 32 nt, Human
ugucucucccacaggucauucuccugugacac

SEQ ID NO: 529245 - RNA, 31 nt, Human
ugucucucccauauuauaccugugucagcca

SEQ ID NO: 529246 - RNA, 32 nt, Human
ugucucuccccauguuucuccccacuagaagc

SEQ ID NO: 529247 - RNA, 22 nt, Human
ugucucuccuaaaaauacaaaa

SEQ ID NO: 529248 - RNA, 32 nt, Human
ugucucuccuaaaaauacaaaaauuagcugga

SEQ ID NO: 529249 - RNA, 32 nt, Human
ugucucuccuaaaaauacaaaaauuggccggg

SEQ ID NO: 529250 - RNA, 32 nt, Human
ugucucuccuaaaaauacaaaauuagccgggc

SEQ ID NO: 529251 - RNA, 32 nt, Human
ugucucuccuaaaaauacagaaaauuagccug

SEQ ID NO: 529252 - RNA, 32 nt, Human
ugucucuccucggaguuggcggaggcggcaac

SEQ ID NO: 529253 - RNA, 32 nt, Human
ugucucuccuucccucccuuccuucaagauaa

SEQ ID NO: 529254 - RNA, 32 nt, Human
ugucucucuacagacugggagaaagaauugga

SEQ ID NO: 529255 - RNA, 32 nt, Human
ugucucucucauccucuuuuccuuccuucuuu

SEQ ID NO: 529256 - RNA, 32 nt, Human
ugucucucuccucuccucaggcucaauaauuc

SEQ ID NO: 529257 - RNA, 32 nt, Human
ugucucucucgaguacagaccagcacaugguc

SEQ ID NO: 529258 - RNA, 32 nt, Human
ugucucucugcgguaccccauggagcugucuu

SEQ ID NO: 529259 - RNA, 32 nt, Human
ugucucucugcuacagcuucuuggcuggcucu

SEQ ID NO: 529260 - RNA, 31 nt, Human
ugucucucuuaauugguauguugaaaugauu

SEQ ID NO: 529261 - RNA, 32 nt, Human
ugucucucuugucccucguucuccccugaagu

SEQ ID NO: 529262 - RNA, 32 nt, Human
ugucucucuuucucucuuucuuucucuguccc

SEQ ID NO: 529263 - RNA, 32 nt, Human
ugucucucuuuguacugucacucucaucuguu

SEQ ID NO: 529264 - RNA, 32 nt, Human
ugucucugagauaccucucuacucagcccagu

SEQ ID NO: 529265 - RNA, 32 nt, Human
ugucucugaugcucuucuucugugucucuauu

SEQ ID NO: 529266 - RNA, 32 nt, Human
ugucucugcaaaauauacaaaaauuagcuggg

SEQ ID NO: 529267 - RNA, 32 nt, Human
ugucucugcaccugucuguccaucugcaugca

SEQ ID NO: 529268 - RNA, 32 nt, Human
ugucucugcacucuaguuucccugugugggcu

SEQ ID NO: 529269 - RNA, 32 nt, Human
ugucucugcagcguucagcauggcacugucuu

SEQ ID NO: 529270 - RNA, 32 nt, Human
ugucucugccucuggcuauucaaguaccucuc

SEQ ID NO: 529271 - RNA, 32 nt, Human
ugucucugccuggagcaggggugguuucuacg

SEQ ID NO: 529272 - RNA, 32 nt, Human
ugucucugcuaaaaauaagaaaaauuagccag

SEQ ID NO: 529273 - RNA, 22 nt, Human
ugucucugcuaaaaauacaaaa

SEQ ID NO: 529274 - RNA, 32 nt, Human
ugucucugcuaaaaauacaaaaauuagccaga

SEQ ID NO: 529275 - RNA, 32 nt, Human
ugucucugcuaaaaauacaaaaauuagccagg

SEQ ID NO: 529276 - RNA, 23 nt, Human
ugucucugcuaaaaauacaaaau

SEQ ID NO: 529277 - RNA, 32 nt, Human
ugucucugcuaaaaauacaaaauuuagcuggg

SEQ ID NO: 529278 - RNA, 32 nt, Human
ugucucugcucaccaggacguacuucucucua

SEQ ID NO: 529279 - RNA, 32 nt, Human
ugucucugcugacuucagccuggucaugcuug

SEQ ID NO: 529280 - RNA, 32 nt, Human
ugucucuggacucuccccugugaggcccaauu

SEQ ID NO: 529281 - RNA, 32 nt, Human
ugucucuggagugcccuacagccccgcaaacu

SEQ ID NO: 529282 - RNA, 29 nt, Human
ugucucuggcugcccucggccuccaagga

SEQ ID NO: 529283 - RNA, 32 nt, Human
ugucucuggcuucauccuugggccagaaggcu

SEQ ID NO: 529284 - RNA, 32 nt, Human
ugucucuggggguggggugagguuggggcgau

SEQ ID NO: 529285 - RNA, 21 nt, Human
ugucucuggguuuuguucuca

SEQ ID NO: 529286 - RNA, 32 nt, Human
ugucucugguguucucuggcucuuguccaucu

SEQ ID NO: 529287 - RNA, 31 nt, Human
ugucucuguauuuucuuacauuuggaguaug

SEQ ID NO: 529288 - RNA, 32 nt, Human
ugucucugucauaacuugucaacacugcugua

SEQ ID NO: 529289 - RNA, 32 nt, Human
ugucucugucccagacccugugucccccacac

SEQ ID NO: 529290 - RNA, 32 nt, Human
ugucucugucucuccuagccccucucucacac

SEQ ID NO: 529291 - RNA, 32 nt, Human
ugucucugugcuuccuucacuucaccuccauc

SEQ ID NO: 529292 - RNA, 32 nt, Human
ugucucugugggcuugggauguuaacaggagc

SEQ ID NO: 529293 - RNA, 32 nt, Human
ugucucuguggguggucacaggcgggugugag

SEQ ID NO: 529294 - RNA, 32 nt, Human
ugucucuguggguggucacaguagcgugugag

SEQ ID NO: 529295 - RNA, 32 nt, Human
ugucucuguggguggucaccggcgggugugag

SEQ ID NO: 529296 - RNA, 32 nt, Human
ugucucuguggguggucacgggagggugugag

SEQ ID NO: 529297 - RNA, 32 nt, Human
ugucucuguguaugugucugugugucugcguc

SEQ ID NO: 529298 - RNA, 23 nt, Human
ugucucuguuaaaaauacaaaau

SEQ ID NO: 529299 - RNA, 32 nt, Human
ugucucuguuaaaaauacaaaauuagccaggc

SEQ ID NO: 529300 - RNA, 32 nt, Human
ugucucuguucccugcuuuggccaguggcuau

SEQ ID NO: 529301 - RNA, 32 nt, Human
ugucucuguugccugggcuggagugcaguggc

SEQ ID NO: 529302 - RNA, 32 nt, Human
ugucucuguuggaccugucucuccucagucua

SEQ ID NO: 529303 - RNA, 32 nt, Human
ugucucuuaaagcucacuaucucuggccauuc

SEQ ID NO: 529304 - RNA, 32 nt, Human
ugucucuucacacagaggcacaaccuggaccc

SEQ ID NO: 529305 - RNA, 31 nt, Human
ugucucuucaucucugcuccugugucauacu

SEQ ID NO: 529306 - RNA, 22 nt, Human
ugucucuuccaaaaauacaaaa

SEQ ID NO: 529307 - RNA, 32 nt, Human
ugucucuucccuggaaaccuucugcaaagaug

SEQ ID NO: 529308 - RNA, 32 nt, Human
ugucucuucuaaaaauacaaauauuagcuggg

SEQ ID NO: 529309 - RNA, 32 nt, Human
ugucucuugugucuucugcugacugcagauua

SEQ ID NO: 529310 - RNA, 32 nt, Human
ugucucuuguucuccucugaguauccaugugu

SEQ ID NO: 529311 - RNA, 32 nt, Human
ugucucuuucugucagaacugucuucuauuuc

SEQ ID NO: 529312 - RNA, 32 nt, Human
ugucucuuucugucuguuucucugucuuaauc

SEQ ID NO: 529313 - RNA, 32 nt, Human
ugucucuuuuaaaaucuacuguauuuauuaua

SEQ ID NO: 529314 - RNA, 32 nt, Human
ugucucuuuuccccaacugagauaguuucuaa

SEQ ID NO: 529315 - RNA, 32 nt, Human
ugucucuuuuccccuacugagauagcuucuga

SEQ ID NO: 529316 - RNA, 32 nt, Human
ugucugaaauguggcagccacugugggccagg

SEQ ID NO: 529317 - RNA, 32 nt, Human
ugucugaacucaccuggccugggaagcaccgu

SEQ ID NO: 529318 - RNA, 32 nt, Human
ugucugaacugcucuggcugggcauuccugag

SEQ ID NO: 529319 - RNA, 32 nt, Human
ugucugaagaacgccaggcugguguccccaga

SEQ ID NO: 529320 - RNA, 32 nt, Human
ugucugaagagauggcaccagggaaaggugug

SEQ ID NO: 529321 - RNA, 32 nt, Human
ugucugaagagggagaugagacagcucucugg

SEQ ID NO: 529322 - RNA, 32 nt, Human
ugucugacaucccacacacaucggcacacuug

SEQ ID NO: 529323 - RNA, 32 nt, Human
ugucugaccacugcagaccagucucggaggug

SEQ ID NO: 529324 - RNA, 32 nt, Human
ugucugacucuuccucuuccuccugcucccug

SEQ ID NO: 529325 - RNA, 32 nt, Human
ugucugagacucuggcuuauuccagguuggcu

SEQ ID NO: 529326 - RNA, 32 nt, Human
ugucugagcaggcagaccagaagaccaggcac

SEQ ID NO: 529327 - RNA, 32 nt, Human
ugucugagcccagccaccugaguuuuuaguac

SEQ ID NO: 529328 - RNA, 21 nt, Human
ugucugagcggagcuuugcgg

SEQ ID NO: 529329 - RNA, 32 nt, Human
ugucugagcucccuuugucauugacguuguaa

SEQ ID NO: 529330 - RNA, 32 nt, Human
ugucugaggaagggagagggagggccuggggu

SEQ ID NO: 529331 - RNA, 32 nt, Human
ugucugagguagcuugaccugcuuucaccugg

SEQ ID NO: 529332 - RNA, 32 nt, Human
ugucugagucaugaagaaauggagauuacuga

SEQ ID NO: 529333 - RNA, 32 nt, Human
ugucugagucugugugggagucagcgaugcuu

SEQ ID NO: 529334 - RNA, 32 nt, Human
ugucugagugagugaaacuacaagagguaaaa

SEQ ID NO: 529335 - RNA, 32 nt, Human
ugucugaguggguggucacgggagggugugug

SEQ ID NO: 529336 - RNA, 21 nt, Human
ugucugaguguugucuggaga

SEQ ID NO: 529337 - RNA, 21 nt, Human
ugucugaucaucagauccugu

SEQ ID NO: 529338 - RNA, 32 nt, Human
ugucugaugcugcucccuucuauccaacauuc

SEQ ID NO: 529339 - RNA, 32 nt, Human
ugucugauuccccuagccgccaccccacguuu

SEQ ID NO: 529340 - RNA, 32 nt, Human
ugucugcaaggagaauacacagcagcgagggg

SEQ ID NO: 529341 - RNA, 32 nt, Human
ugucugcacaaacucuggucuguuuugcacgg

SEQ ID NO: 529342 - RNA, 32 nt, Human
ugucugcacaccaucucccaccagccuccccu

SEQ ID NO: 529343 - RNA, 32 nt, Human
ugucugcaccagccggccucagccuggcugga

SEQ ID NO: 529344 - RNA, 32 nt, Human
ugucugcacccagggguggggaauguuugggc

SEQ ID NO: 529345 - RNA, 32 nt, Human
ugucugcaccuccuuucccucucuccaucuuc

SEQ ID NO: 529346 - RNA, 32 nt, Human
ugucugcaccugugaccaucaggaugagcugg

SEQ ID NO: 529347 - RNA, 32 nt, Human
ugucugcagcacccuccacuucucuccuaggc

SEQ ID NO: 529348 - RNA, 32 nt, Human
ugucugcagcagagugacagcaguggagauug

SEQ ID NO: 529349 - RNA, 32 nt, Human
ugucugcagccgaggagacaacuacaaacaga

SEQ ID NO: 529350 - RNA, 32 nt, Human
ugucugcagccucugcucacuccaggacgugc

SEQ ID NO: 529351 - RNA, 21 nt, Human
ugucugcagggcucccucuac

SEQ ID NO: 529352 - RNA, 32 nt, Human
ugucugcagggcuggccucccacagcagugug

SEQ ID NO: 529353 - RNA, 32 nt, Human
ugucugcaguaggaaggaaagaggcuaaucuc

SEQ ID NO: 529354 - RNA, 32 nt, Human
ugucugcaugaucuaucccagacugaaaagag

SEQ ID NO: 529355 - RNA, 32 nt, Human
ugucugcauuaaaaauacuagagauuaggcca

SEQ ID NO: 529356 - RNA, 32 nt, Human
ugucugcauuuuaccauagauuggagugcauc

SEQ ID NO: 529357 - RNA, 32 nt, Human
ugucugccaaucuggguaggcccaguggccaa

SEQ ID NO: 529358 - RNA, 32 nt, Human
ugucugccaccaaaggugaccaccaugucggu

SEQ ID NO: 529359 - RNA, 32 nt, Human
ugucugccacgcgcagccccuugugcgggauc

SEQ ID NO: 529360 - RNA, 21 nt, Human
ugucugccagccucccaggcc

SEQ ID NO: 529361 - RNA, 32 nt, Human
ugucugccaguggaguccauguuuccaccacu

SEQ ID NO: 529362 - RNA, 32 nt, Human
ugucugccaugcgcuucuuccucccaggcuac

SEQ ID NO: 529363 - RNA, 32 nt, Human
ugucugcccaccacccuucuuucugaacgugg

SEQ ID NO: 529364 - RNA, 19 nt, Human
ugucugcccauguccugcu

SEQ ID NO: 529365 - RNA, 32 nt, Human
ugucugccccggccaaggaguuugucaaggug

SEQ ID NO: 529366 - RNA, 32 nt, Human
ugucugcccuaaaagacaguaaguaggaauau

SEQ ID NO: 529367 - RNA, 32 nt, Human
ugucugcccuaaaagauaguaaguaggaauau

SEQ ID NO: 529368 - RNA, 32 nt, Human
ugucugcccuacugcuuccugcagcuggccua

SEQ ID NO: 529369 - RNA, 32 nt, Human
ugucugcccugagaugcucgcucuccugcugg

SEQ ID NO: 529370 - RNA, 32 nt, Human
ugucugccgggggcccaggcugugcugucccu

SEQ ID NO: 529371 - RNA, 32 nt, Human
ugucugccucccaggcucugcagaccguggcc

SEQ ID NO: 529372 - RNA, 32 nt, Human
ugucugccugaggagggaaagggggaguggcc

SEQ ID NO: 529373 - RNA, 32 nt, Human
ugucugccugggauaaaauauuuuccccaucu

SEQ ID NO: 529374 - RNA, 32 nt, Human
ugucugccuguucuccccucgucgguggcuaa

SEQ ID NO: 529375 - RNA, 32 nt, Human
ugucugccuucaguggucugaggucccaguau

SEQ ID NO: 529376 - RNA, 32 nt, Human
ugucugccuuucuucugcuugggcucuucaag

SEQ ID NO: 529377 - RNA, 20 nt, Human
ugucugcgccugcccuccgc

SEQ ID NO: 529378 - RNA, 32 nt, Human
ugucugcuaucaaaccacuucugacaaaauua

SEQ ID NO: 529379 - RNA, 32 nt, Human
ugucugcuaucagcuaugccgcugcccguugc

SEQ ID NO: 529380 - RNA, 32 nt, Human
ugucugcucacugcugccaucuucgcugcuag

SEQ ID NO: 529381 - RNA, 32 nt, Human
ugucugcucaugggagaauggcagagggaucc

SEQ ID NO: 529382 - RNA, 32 nt, Human
ugucugcuccgggucucuaccuggucuccauc

SEQ ID NO: 529383 - RNA, 32 nt, Human
ugucugcucucuggaccccacgugaucuggcc

SEQ ID NO: 529384 - RNA, 32 nt, Human
ugucugcugcagcuuccgugccccguucuccu

SEQ ID NO: 529385 - RNA, 32 nt, Human
ugucugcugccuggcuccuagauggcucugcg

SEQ ID NO: 529386 - RNA, 32 nt, Human
ugucugcugcucccucuccucagccaguuggg

SEQ ID NO: 529387 - RNA, 32 nt, Human
ugucugcugcugcuguccgagcuucacaaugc

SEQ ID NO: 529388 - RNA, 32 nt, Human
ugucugcugcuggcucugcccuguggccguga

SEQ ID NO: 529389 - RNA, 32 nt, Human
ugucugcugggcugcacuggggcuguucaugg

SEQ ID NO: 529390 - RNA, 32 nt, Human
ugucugcugugggugcgguggugaggaguggc

SEQ ID NO: 529391 - RNA, 32 nt, Human
ugucugcuguuuagaacuuuguggacugcacu

SEQ ID NO: 529392 - RNA, 32 nt, Human
ugucugcuucuacuacuccaucaaggucaacu

SEQ ID NO: 529393 - RNA, 32 nt, Human
ugucugcuuguuugcgacagagcgagacuccg

SEQ ID NO: 529394 - RNA, 32 nt, Human
ugucuggaacaguggaccaaugcuggggacca

SEQ ID NO: 529395 - RNA, 23 nt, Human
ugucuggaaggugaaaaccaagg

SEQ ID NO: 529396 - RNA, 32 nt, Human
ugucuggacacccggccccagcuccagcccca

SEQ ID NO: 529397 - RNA, 32 nt, Human
ugucuggaccugggcccugcucaaugccaccu

SEQ ID NO: 529398 - RNA, 32 nt, Human
ugucuggagccguagcggcaagugggcuugcg

SEQ ID NO: 529399 - RNA, 32 nt, Human
ugucuggaggaggccugcaucccuccugagcu

SEQ ID NO: 529400 - RNA, 32 nt, Human
ugucuggagggccauggagaagaggcugggag

SEQ ID NO: 529401 - RNA, 32 nt, Human
ugucuggaggggcaguguacaggugcucuauu

SEQ ID NO: 529402 - RNA, 32 nt, Human
ugucuggagucuuuugccaucuggaucuuagu

SEQ ID NO: 529403 - RNA, 31 nt, Human
ugucuggauucugccucuugccaaagcagag

SEQ ID NO: 529404 - RNA, 32 nt, Human
ugucuggcacauguucuguaauccaagauguc

SEQ ID NO: 529405 - RNA, 32 nt, Human
ugucuggcagaagaaauuucuaagcagcgaaa

SEQ ID NO: 529406 - RNA, 21 nt, Human
ugucuggcagagaccugugga

SEQ ID NO: 529407 - RNA, 32 nt, Human
ugucuggccagcugcccacgaccuacggugua

SEQ ID NO: 529408 - RNA, 22 nt, Human
ugucuggcccccacccacugcc

SEQ ID NO: 529409 - RNA, 32 nt, Human
ugucuggccuuuugucucauccuucuuggcaa

SEQ ID NO: 529410 - RNA, 22 nt, Human
ugucuggcgcauccucagugga

SEQ ID NO: 529411 - RNA, 32 nt, Human
ugucuggcuccagcccuuucucugugccuuca

SEQ ID NO: 529412 - RNA, 32 nt, Human
ugucuggcuggcuccguccgugugacagccca

SEQ ID NO: 529413 - RNA, 32 nt, Human
ugucuggcuggguggaagaaggguguggaagg

SEQ ID NO: 529414 - RNA, 32 nt, Human
ugucuggcuucucucuggacugggagcucagu

SEQ ID NO: 529415 - RNA, 32 nt, Human
ugucugggaaccugggcaggaggcacagagga

SEQ ID NO: 529416 - RNA, 32 nt, Human
ugucugggaacugccucccucaucugugcccc

SEQ ID NO: 529417 - RNA, 32 nt, Human
ugucugggaagcagggauugcugacauguauu

SEQ ID NO: 529418 - RNA, 32 nt, Human
ugucugggacucaggaguccuaaggaaaagga

SEQ ID NO: 529419 - RNA, 32 nt, Human
ugucugggagagaggauaggaugggaaugcug

SEQ ID NO: 529420 - RNA, 32 nt, Human
ugucugggcugcagggacauugcaguguccca

SEQ ID NO: 529421 - RNA, 32 nt, Human
ugucugggcugcucccgcugcacccagcggcu

SEQ ID NO: 529422 - RNA, 32 nt, Human
ugucuggggaaaggugggccuggcagaagaca

SEQ ID NO: 529423 - RNA, 32 nt, Human
ugucugggggauaacagugcucucuuaccuca

SEQ ID NO: 529424 - RNA, 32 nt, Human
ugucugggggccucucugggccuuugugugcc

SEQ ID NO: 529425 - RNA, 32 nt, Human
ugucugggguauucacuuggcuccucagcaag

SEQ ID NO: 529426 - RNA, 32 nt, Human
ugucuggggugaauggaaugagcuggagcuug

SEQ ID NO: 529427 - RNA, 32 nt, Human
ugucuggggugcugugcacccccuggagccug

SEQ ID NO: 529428 - RNA, 16 nt, Human
ugucugggucuggaga

SEQ ID NO: 529429 - RNA, 32 nt, Human
ugucuggugaucacuuuaugucucacagggac

SEQ ID NO: 529430 - RNA, 32 nt, Human
ugucuggugaugaugucuuucauggcaucuga

SEQ ID NO: 529431 - RNA, 32 nt, Human
ugucuggugauuuucugccugguggggccauu

SEQ ID NO: 529432 - RNA, 22 nt, Human
ugucuggugcccaaucccagga

SEQ ID NO: 529433 - RNA, 32 nt, Human
ugucugguugcccugccucuggcuccagaaca

SEQ ID NO: 529434 - RNA, 32 nt, Human
ugucuguaaagugcuuugaggaucuccccagc

SEQ ID NO: 529435 - RNA, 32 nt, Human
ugucuguacagccucuaggccccagccccgga

SEQ ID NO: 529436 - RNA, 32 nt, Human
ugucuguaccaaaaauacaaaaaguuagcugg

SEQ ID NO: 529437 - RNA, 32 nt, Human
ugucuguaccaaaaauacaaaaauuaauuggg

SEQ ID NO: 529438 - RNA, 22 nt, Human
ugucuguacuaaaaauacaaaa

SEQ ID NO: 529439 - RNA, 32 nt, Human
ugucuguacuaaaaauacaaaaaucagccaga

SEQ ID NO: 529440 - RNA, 32 nt, Human
ugucuguacuaaaaauacaaaaauuaacuggg

SEQ ID NO: 529441 - RNA, 32 nt, Human
ugucuguacuaaaaauacaaaaauuagccaga

SEQ ID NO: 529442 - RNA, 32 nt, Human
ugucuguacuaaaaauacaaaaauuagccagg

SEQ ID NO: 529443 - RNA, 32 nt, Human
ugucuguacuaaaaauacaaaaauuagcccag

SEQ ID NO: 529444 - RNA, 32 nt, Human
ugucuguacuaaaaauacaaaaauuagccggg

SEQ ID NO: 529445 - RNA, 32 nt, Human
ugucuguacuaaaaauacaaaaguuagcugag

SEQ ID NO: 529446 - RNA, 23 nt, Human
ugucuguacuaaaaauacaaaau

SEQ ID NO: 529447 - RNA, 32 nt, Human
ugucuguacuaaaaauacaaaauuuagccagg

SEQ ID NO: 529448 - RNA, 32 nt, Human
ugucuguacuaaaaauacagaauuagccgggc

SEQ ID NO: 529449 - RNA, 32 nt, Human
ugucuguacuaaaaaugcaaaaauuagcuggg

SEQ ID NO: 529450 - RNA, 32 nt, Human
ugucuguacuaaaauacaaaaaucagccaggc

SEQ ID NO: 529451 - RNA, 32 nt, Human
ugucuguacuucuguuugaacuuuccacguug

SEQ ID NO: 529452 - RNA, 32 nt, Human
ugucuguagaagaugcuuccuccauuaaacug

SEQ ID NO: 529453 - RNA, 32 nt, Human
ugucuguagggcugggacagggaaggaaguca

SEQ ID NO: 529454 - RNA, 32 nt, Human
ugucuguaggugucucugggccuguguguggg

SEQ ID NO: 529455 - RNA, 22 nt, Human
ugucuguaguaaaaauacaaaa

SEQ ID NO: 529456 - RNA, 32 nt, Human
ugucuguaguaaaaauacaaaaauuagcuggg

SEQ ID NO: 529457 - RNA, 32 nt, Human
ugucuguaguuucuuuauuaagcucugaaaac

SEQ ID NO: 529458 - RNA, 32 nt, Human
ugucuguauccccagugcccggugcagggccu

SEQ ID NO: 529459 - RNA, 32 nt, Human
ugucuguauguuuguguacacacacgugccca

SEQ ID NO: 529460 - RNA, 24 nt, Human
ugucugucaaggaucuuugucgug

SEQ ID NO: 529461 - RNA, 32 nt, Human
ugucugucaaucucccuucuugcugauuagcu

SEQ ID NO: 529462 - RNA, 32 nt, Human
ugucugucacauuaguagauucugagauuaaa

SEQ ID NO: 529463 - RNA, 32 nt, Human
ugucugucacccaggcuggaguacaguggcau

SEQ ID NO: 529464 - RNA, 32 nt, Human
ugucugucagacacacacaggucgccagugac

SEQ ID NO: 529465 - RNA, 32 nt, Human
ugucugucagcccucuuaacucugugcacgcc

SEQ ID NO: 529466 - RNA, 22 nt, Human
ugucugucagugaccuucugua

SEQ ID NO: 529467 - RNA, 32 nt, Human
ugucugucauacgcuaaaaugauauuggucuu

SEQ ID NO: 529468 - RNA, 32 nt, Human
ugucugucaugagugcaugaaggaggccaaga

SEQ ID NO: 529469 - RNA, 32 nt, Human
ugucugucccacccugauccuuuucaauauau

SEQ ID NO: 529470 - RNA, 32 nt, Human
ugucugucccucacagcaccaaauguucccug

SEQ ID NO: 529471 - RNA, 32 nt, Human
ugucugucccugacuucugccucugagauugu

SEQ ID NO: 529472 - RNA, 32 nt, Human
ugucuguccggccugcacccagccccugccca

SEQ ID NO: 529473 - RNA, 31 nt, Human
ugucuguccgucucugggaauggucgcuucc

SEQ ID NO: 529474 - RNA, 19 nt, Human
ugucuguccuggguguaga

SEQ ID NO: 529475 - RNA, 24 nt, Human
ugucuguccuugugauuuggcaua

SEQ ID NO: 529476 - RNA, 32 nt, Human
ugucuguccuuuuccuccuuggagccugggcc

SEQ ID NO: 529477 - RNA, 32 nt, Human
ugucugucgcugcugccgccuccacccagccu

SEQ ID NO: 529478 - RNA, 32 nt, Human
ugucugucucccacccucacugaucacgccug

SEQ ID NO: 529479 - RNA, 32 nt, Human
ugucugucuccugcccacaucucccuuccuuc

SEQ ID NO: 529480 - RNA, 32 nt, Human
ugucugucucuaguuucuuucuguuauugcac

SEQ ID NO: 529481 - RNA, 32 nt, Human
ugucugucucugucuguugcucgaauaacucu

SEQ ID NO: 529482 - RNA, 32 nt, Human
ugucugucugacgacaucucuccuggggucug

SEQ ID NO: 529483 - RNA, 32 nt, Human
ugucugucugagucucguggccgccccuggac

SEQ ID NO: 529484 - RNA, 32 nt, Human
ugucugucugcugccaggauggagcagaggag

SEQ ID NO: 529485 - RNA, 32 nt, Human
ugucugucugggaggauggggcaguaaaugag

SEQ ID NO: 529486 - RNA, 25 nt, Human
ugucugucugguccauagcuguggu

SEQ ID NO: 529487 - RNA, 32 nt, Human
ugucugucugucugucccucccucucugaacc

SEQ ID NO: 529488 - RNA, 32 nt, Human
ugucugucuugaugugugagcagcagcugugg

SEQ ID NO: 529489 - RNA, 32 nt, Human
ugucugucuuucuccuauccuuugugucuuug

SEQ ID NO: 529490 - RNA, 32 nt, Human
ugucugugaaacugguacaaccugccauaaga

SEQ ID NO: 529491 - RNA, 23 nt, Human
ugucugugaagacuuccuggaga

SEQ ID NO: 529492 - RNA, 32 nt, Human
ugucugugacucgcucuggaccccacuucccg

SEQ ID NO: 529493 - RNA, 32 nt, Human
ugucugugagccaguuccagcuggcuccagcc

SEQ ID NO: 529494 - RNA, 32 nt, Human
ugucugugcauccugaaccacucuuugcuggg

SEQ ID NO: 529495 - RNA, 32 nt, Human
ugucugugcauucaugcaucuaccucauuccg

SEQ ID NO: 529496 - RNA, 32 nt, Human
ugucugugccauaacacaguacuagaccacuu

SEQ ID NO: 529497 - RNA, 32 nt, Human
ugucugugcccaagcccuuccaccagaaaagc

SEQ ID NO: 529498 - RNA, 32 nt, Human
ugucugugccuagugaauuucccuuacauuuc

SEQ ID NO: 529499 - RNA, 32 nt, Human
ugucugugccugggagaacagagcaggagcgu

SEQ ID NO: 529500 - RNA, 32 nt, Human
ugucugugcguucuccugcguggcaguccuga

SEQ ID NO: 529501 - RNA, 32 nt, Human
ugucugugcucacccaggcugagggugccuuu

SEQ ID NO: 529502 - RNA, 20 nt, Human
ugucugugcuggcuggaaga

SEQ ID NO: 529503 - RNA, 17 nt, Human
ugucuguggauuggaga

SEQ ID NO: 529504 - RNA, 32 nt, Human
ugucugugggaggcgccggggugauggcggug

SEQ ID NO: 529505 - RNA, 19 nt, Human
ugucuguggggaccugaga

SEQ ID NO: 529506 - RNA, 32 nt, Human
ugucuguggggagggguuguuuugggguuguu

SEQ ID NO: 529507 - RNA, 32 nt, Human
ugucuguggucugccaaauacuugcuuaaacu

SEQ ID NO: 529508 - RNA, 32 nt, Human
ugucuguggugccauuugauucccugacacug

SEQ ID NO: 529509 - RNA, 32 nt, Human
ugucugugucccauccugcuguccuucugucc

SEQ ID NO: 529510 - RNA, 18 nt, Human
ugucuguguccucggagg

SEQ ID NO: 529511 - RNA, 32 nt, Human
ugucugugucuccagugcucccauuccaucgc

SEQ ID NO: 529512 - RNA, 32 nt, Human
ugucugugucuccucuucugucucuuagaagg

SEQ ID NO: 529513 - RNA, 32 nt, Human
ugucugugucugcacugcuccccaggauguuc

SEQ ID NO: 529514 - RNA, 29 nt, Human
ugucugugucugugugugccugugagcca

SEQ ID NO: 529515 - RNA, 32 nt, Human
ugucugugugcagccuaugccugcugcucaga

SEQ ID NO: 529516 - RNA, 32 nt, Human
ugucuguguggcuuucccucccugccuccccc

SEQ ID NO: 529517 - RNA, 32 nt, Human
ugucuguguggguggucacagaagggugugug

SEQ ID NO: 529518 - RNA, 32 nt, Human
ugucuguguggguggucacaggagggugugag

SEQ ID NO: 529519 - RNA, 32 nt, Human
ugucuguguggguggucacaggagggugugug

SEQ ID NO: 529520 - RNA, 32 nt, Human
ugucuguguggguggucacgggagcgugugag

SEQ ID NO: 529521 - RNA, 32 nt, Human
ugucuguguggguggucacgggagggugugag

SEQ ID NO: 529522 - RNA, 32 nt, Human
ugucuguguggguggucacgggagggugugug

SEQ ID NO: 529523 - RNA, 32 nt, Human
ugucuguguguaugcauacauauguguguaua

SEQ ID NO: 529524 - RNA, 32 nt, Human
ugucuguguguauguuagucugucaacuucgg

SEQ ID NO: 529525 - RNA, 17 nt, Human
ugucugugugucuguga

SEQ ID NO: 529526 - RNA, 32 nt, Human
ugucugugugugugcacgcgcgugcacgucac

SEQ ID NO: 529527 - RNA, 32 nt, Human
ugucugugugugugcaugugcacacauguguu

SEQ ID NO: 529528 - RNA, 17 nt, Human
ugucuguguguuugaga

SEQ ID NO: 529529 - RNA, 32 nt, Human
ugucuguguuccaaauccaccaauugacgaga

SEQ ID NO: 529530 - RNA, 17 nt, Human
ugucuguguucuuggag

SEQ ID NO: 529531 - RNA, 19 nt, Human
ugucuguguuuguuugaga

SEQ ID NO: 529532 - RNA, 22 nt, Human
ugucuguuaaaugaaugucaua

SEQ ID NO: 529533 - RNA, 24 nt, Human
ugucuguuaaguggucuuuucaua

SEQ ID NO: 529534 - RNA, 32 nt, Human
ugucuguuauagaaaacccacacccacugucc

SEQ ID NO: 529535 - RNA, 32 nt, Human
ugucuguuccagccuacauccuuccugggugu

SEQ ID NO: 529536 - RNA, 17 nt, Human
ugucuguucccuggagg

SEQ ID NO: 529537 - RNA, 32 nt, Human
ugucuguucccuggaggccaguccagugcuca

SEQ ID NO: 529538 - RNA, 32 nt, Human
ugucuguuccuauuccauucucccaggagcuu

SEQ ID NO: 529539 - RNA, 32 nt, Human
ugucuguucuaauauugggacuucugauuaug

SEQ ID NO: 529540 - RNA, 32 nt, Human
ugucuguucuucagugcuggagguccuggcag

SEQ ID NO: 529541 - RNA, 32 nt, Human
ugucuguugcucacagaugcagagacugacaa

SEQ ID NO: 529542 - RNA, 32 nt, Human
ugucuguuuacacuucucuguaggcguggguu

SEQ ID NO: 529543 - RNA, 22 nt, Human
ugucuguuuccccauccugcca

SEQ ID NO: 529544 - RNA, 32 nt, Human
ugucuguuuuugaaagguguugcuuucaagua

SEQ ID NO: 529545 - RNA, 32 nt, Human
ugucuuaaauaacauuuauuucucacaguccu

SEQ ID NO: 529546 - RNA, 32 nt, Human
ugucuuaaauguauacauuagauguguguuuu

SEQ ID NO: 529547 - RNA, 29 nt, Human
ugucuuaauaaauauuuuaucaaaauguc

SEQ ID NO: 529548 - RNA, 32 nt, Human
ugucuuacagagaagagaagagggagucagcc

SEQ ID NO: 529549 - RNA, 32 nt, Human
ugucuuacaucuccauuuuauagaugagaaag

SEQ ID NO: 529550 - RNA, 32 nt, Human
ugucuuacauugaagcacagacugcagagcac

SEQ ID NO: 529551 - RNA, 32 nt, Human
ugucuuaccagcauuucuucugggcuugugau

SEQ ID NO: 529552 - RNA, 32 nt, Human
ugucuuaccucuacugaauauucuagugaguu

SEQ ID NO: 529553 - RNA, 32 nt, Human
ugucuuaccuuucuccccuagugcucaugccc

SEQ ID NO: 529554 - RNA, 32 nt, Human
ugucuuacugugcuucaacuucccaaggaauu

SEQ ID NO: 529555 - RNA, 32 nt, Human
ugucuuagagcagcaauucauuaucagaggga

SEQ ID NO: 529556 - RNA, 21 nt, Human
ugucuuagcccaagguguaga

SEQ ID NO: 529557 - RNA, 32 nt, Human
ugucuuagcuacucaggaggcugaggcaggag

SEQ ID NO: 529558 - RNA, 32 nt, Human
ugucuuagggugcucccugugacagauccugg

SEQ ID NO: 529559 - RNA, 32 nt, Human
ugucuuagucaaggugcugcagaaggacagaa

SEQ ID NO: 529560 - RNA, 32 nt, Human
ugucuuauagguuuacacugccaaaacaaugc

SEQ ID NO: 529561 - RNA, 32 nt, Human
ugucuuauggcugggugcaguggcucaugccc

SEQ ID NO: 529562 - RNA, 32 nt, Human
ugucuuaugucagcugggcacaguggcucaca

SEQ ID NO: 529563 - RNA, 32 nt, Human
ugucuuauuaaaucuucacuguauuuaaugca

SEQ ID NO: 529564 - RNA, 32 nt, Human
ugucuucaacaacaggugcugcuuagucauuu

SEQ ID NO: 529565 - RNA, 32 nt, Human
ugucuucaacaucauuugauacuauagacuua

SEQ ID NO: 529566 - RNA, 32 nt, Human
ugucuucacugagguccucgcgcucagaaaag

SEQ ID NO: 529567 - RNA, 32 nt, Human
ugucuucacugccuccuuuucccugucaugcu

SEQ ID NO: 529568 - RNA, 32 nt, Human
ugucuucacugcucuguguccucugcuccuag

SEQ ID NO: 529569 - RNA, 32 nt, Human
ugucuucacugcuguguguccucugcuccuag

SEQ ID NO: 529570 - RNA, 32 nt, Human
ugucuucagcacaaaacaccuucaauguucug

SEQ ID NO: 529571 - RNA, 32 nt, Human
ugucuucaguaaaauauuuucuuuaucuaaau

SEQ ID NO: 529572 - RNA, 32 nt, Human
ugucuucaguagcgacugaaucugccacucuc

SEQ ID NO: 529573 - RNA, 32 nt, Human
ugucuucagugcaauguggcauccuggauugg

SEQ ID NO: 529574 - RNA, 32 nt, Human
ugucuucaugccaaccacagccuguuucugcu

SEQ ID NO: 529575 - RNA, 32 nt, Human
ugucuucaugucguuguucugccuuucacaaa

SEQ ID NO: 529576 - RNA, 28 nt, Human
ugucuuccaagugccauccaucaucagu

SEQ ID NO: 529577 - RNA, 32 nt, Human
ugucuuccacacccuuccucccuccaggcucc

SEQ ID NO: 529578 - RNA, 32 nt, Human
ugucuuccagcuugcccugccuccagcaggaa

SEQ ID NO: 529579 - RNA, 23 nt, Human
ugucuuccaggcuggagugcagu

SEQ ID NO: 529580 - RNA, 24 nt, Human
ugucuuccaggcuggagugcagug

SEQ ID NO: 529581 - RNA, 32 nt, Human
ugucuuccauggagccucaggugcucccccuc

SEQ ID NO: 529582 - RNA, 21 nt, Human
ugucuucccaccugugugucc

SEQ ID NO: 529583 - RNA, 32 nt, Human
ugucuucccacuuuaagcuuguuuucaguaca

SEQ ID NO: 529584 - RNA, 23 nt, Human
ugucuucccaguggcuuuccaug

SEQ ID NO: 529585 - RNA, 22 nt, Human
ugucuucccaguguccuuggag

SEQ ID NO: 529586 - RNA, 22 nt, Human
ugucuuccccacccagcucucc

SEQ ID NO: 529587 - RNA, 32 nt, Human
ugucuuccccacccucaccuccaucccaucaa

SEQ ID NO: 529588 - RNA, 32 nt, Human
ugucuuccccuggaacugggcacuggcguaca

SEQ ID NO: 529589 - RNA, 23 nt, Human
ugucuucccgguaucccuuggag

SEQ ID NO: 529590 - RNA, 23 nt, Human
ugucuucccgugugucuucagga

SEQ ID NO: 529591 - RNA, 32 nt, Human
ugucuucccuaacauagccugggagaccaccc

SEQ ID NO: 529592 - RNA, 24 nt, Human
ugucuucccugggccacauuggaa

SEQ ID NO: 529593 - RNA, 32 nt, Human
ugucuuccucaagcaguuuaggugcaugaucu

SEQ ID NO: 529594 - RNA, 32 nt, Human
ugucuuccucagaccccagcucccucuugccc

SEQ ID NO: 529595 - RNA, 32 nt, Human
ugucuuccuccaaccucccccuuuuucguugu

SEQ ID NO: 529596 - RNA, 32 nt, Human
ugucuuccucucccuucuccucugcugcagca

SEQ ID NO: 529597 - RNA, 32 nt, Human
ugucuuccucugucuuccuuuuuacuuccuuu

SEQ ID NO: 529598 - RNA, 32 nt, Human
ugucuuccugacuccagccucugagacagaau

SEQ ID NO: 529599 - RNA, 32 nt, Human
ugucuuccuuccaacucuuaaacauuuuuguu

SEQ ID NO: 529600 - RNA, 32 nt, Human
ugucuuccuugggggaggagauggugucguuu

SEQ ID NO: 529601 - RNA, 32 nt, Human
ugucuuccuuucuccccuuuggaugguuggug

SEQ ID NO: 529602 - RNA, 32 nt, Human
ugucuuccuuucucucuucccuuccccucucu

SEQ ID NO: 529603 - RNA, 17 nt, Human
ugucuucgcggaagcau

SEQ ID NO: 529604 - RNA, 32 nt, Human
ugucuucucaagaacaaaacugugcuguuaca

SEQ ID NO: 529605 - RNA, 32 nt, Human
ugucuucucccaggucucucuuggguacugcc

SEQ ID NO: 529606 - RNA, 32 nt, Human
ugucuucuccccuaggugguuccugagccccc

SEQ ID NO: 529607 - RNA, 32 nt, Human
ugucuucucugucaucgagauggucuucaucg

SEQ ID NO: 529608 - RNA, 32 nt, Human
ugucuucucugucucagacuuuuguacaucug

SEQ ID NO: 529609 - RNA, 32 nt, Human
ugucuucucuuccuccuccaccgagucgugcu

SEQ ID NO: 529610 - RNA, 32 nt, Human
ugucuucucuugaacugcauaacugagaacuc

SEQ ID NO: 529611 - RNA, 32 nt, Human
ugucuucucuuuccucugcccuucccacaggg

SEQ ID NO: 529612 - RNA, 32 nt, Human
ugucuucugccucucucucguuucuuccccca

SEQ ID NO: 529613 - RNA, 32 nt, Human
ugucuucugccuggucuauagcguguguguuu

SEQ ID NO: 529614 - RNA, 18 nt, Human
ugucuucugcuguaauua

SEQ ID NO: 529615 - RNA, 32 nt, Human
ugucuucuggaaaaucauggauuuucauauuu

SEQ ID NO: 529616 - RNA, 32 nt, Human
ugucuucugggacuggacauuuugacuccaag

SEQ ID NO: 529617 - RNA, 32 nt, Human
ugucuucugggugacagacaaaauagcuuguc

SEQ ID NO: 529618 - RNA, 32 nt, Human
ugucuucuguccccaucuuccugccgauagcu

SEQ ID NO: 529619 - RNA, 32 nt, Human
ugucuucugucuuuacccagagcuaccaugag

SEQ ID NO: 529620 - RNA, 32 nt, Human
ugucuucuuuccuccaaccucuuaccuuagau

SEQ ID NO: 529621 - RNA, 32 nt, Human
ugucuucuuugaucauuugauuuuggauccaa

SEQ ID NO: 529622 - RNA, 32 nt, Human
ugucuucuuugcaauaggcagcuugacugcag

SEQ ID NO: 529623 - RNA, 32 nt, Human
ugucuugaacagcuggagggaagaugcagggg

SEQ ID NO: 529624 - RNA, 32 nt, Human
ugucuugaaccuaggagguggagguugcagug

SEQ ID NO: 529625 - RNA, 32 nt, Human
ugucuugagacagggucuggcucuguuggcag

SEQ ID NO: 529626 - RNA, 32 nt, Human
ugucuugagguugucagcaggugcaagacacg

SEQ ID NO: 529627 - RNA, 32 nt, Human
ugucuugauuuuugccuuuucgaugccauauu

SEQ ID NO: 529628 - RNA, 32 nt, Human
ugucuugcaguucagauuaugcagccaagggu

SEQ ID NO: 529629 - RNA, 32 nt, Human
ugucuugccaggaguuaagcggccucuggggu

SEQ ID NO: 529630 - RNA, 32 nt, Human
ugucuugccaucaacccuccccagacccccag

SEQ ID NO: 529631 - RNA, 32 nt, Human
ugucuugcccaaggucacacagcuggugugug

SEQ ID NO: 529632 - RNA, 25 nt, Human
ugucuugcccaggcuggagugcagu

SEQ ID NO: 529633 - RNA, 32 nt, Human
ugucuugcccaggcuggagugcaguggccuga

SEQ ID NO: 529634 - RNA, 32 nt, Human
ugucuugcccaggcuggaguucaggggcuauu

SEQ ID NO: 529635 - RNA, 32 nt, Human
ugucuugccuccaggaccugggaagggugaug

SEQ ID NO: 529636 - RNA, 32 nt, Human
ugucuugccuguauaaagccuuuugguccucu

SEQ ID NO: 529637 - RNA, 32 nt, Human
ugucuugcgagaaguaagaagauggaaaagga

SEQ ID NO: 529638 - RNA, 32 nt, Human
ugucuugcgccuguacucccagcacuuuggga

SEQ ID NO: 529639 - RNA, 32 nt, Human
ugucuugcucacucuuaaacucucccaagaac

SEQ ID NO: 529640 - RNA, 32 nt, Human
ugucuugcucuccccuccccuggcuuuccucu

SEQ ID NO: 529641 - RNA, 32 nt, Human
ugucuugcugggagggucugcaggagaaccgc

SEQ ID NO: 529642 - RNA, 32 nt, Human
ugucuugcugugugaugcucagccugaggcac

SEQ ID NO: 529643 - RNA, 32 nt, Human
ugucuugcuucaugauuccucucuccauuacu

SEQ ID NO: 529644 - RNA, 32 nt, Human
ugucuuggaaaugacuagagaggcagaggaga

SEQ ID NO: 529645 - RNA, 32 nt, Human
ugucuuggauccucagugcugccaaaaggcca

SEQ ID NO: 529646 - RNA, 32 nt, Human
ugucuuggauuccuuagccccuugccaguccu

SEQ ID NO: 529647 - RNA, 32 nt, Human
ugucuuggcacuggccaggcuuggguggagcc

SEQ ID NO: 529648 - RNA, 32 nt, Human
ugucuuggcaucuucugccuuugcuacugagc

SEQ ID NO: 529649 - RNA, 32 nt, Human
ugucuuggccacuccuagagcgugugcagacu

SEQ ID NO: 529650 - RNA, 32 nt, Human
ugucuugggaaagaugaagacgaaaaacagga

SEQ ID NO: 529651 - RNA, 32 nt, Human
ugucuugggccacacaugaaauucacaaacac

SEQ ID NO: 529652 - RNA, 32 nt, Human
ugucuugggcgaggcagcugugagcauugcac

SEQ ID NO: 529653 - RNA, 32 nt, Human
ugucuuggggguggaaagggagggaugaauug

SEQ ID NO: 529654 - RNA, 32 nt, Human
ugucuuggucacugcugagacccacaggucua

SEQ ID NO: 529655 - RNA, 32 nt, Human
ugucuuggucucaaguugccucauugcggcug

SEQ ID NO: 529656 - RNA, 32 nt, Human
ugucuuggucuguugcccuccuucuuggcaug

SEQ ID NO: 529657 - RNA, 32 nt, Human
ugucuugguugucagugguggcaccaggaugg

SEQ ID NO: 529658 - RNA, 32 nt, Human
ugucuugugugagguguucugccgggauagaa

SEQ ID NO: 529659 - RNA, 32 nt, Human
ugucuugugugugguacuucauguuuucuugc

SEQ ID NO: 529660 - RNA, 32 nt, Human
ugucuuguuucagugagagacgcccuauuucu

SEQ ID NO: 529661 - RNA, 32 nt, Human
ugucuuuaaaaauuaaguggaagaagaauuac

SEQ ID NO: 529662 - RNA, 32 nt, Human
ugucuuuaaacagcaacuacagaaguggaagu

SEQ ID NO: 529663 - RNA, 32 nt, Human
ugucuuuaaauacuucaugagcauucauaauu

SEQ ID NO: 529664 - RNA, 32 nt, Human
ugucuuuaagaaauaaguggcuuuuguuguug

SEQ ID NO: 529665 - RNA, 32 nt, Human
ugucuuuaccaaaaguuuaaaaauuagcuugg

SEQ ID NO: 529666 - RNA, 22 nt, Human
ugucuuuacuaaaaauacaaaa

SEQ ID NO: 529667 - RNA, 32 nt, Human
ugucuuuacuaaaaauacaaaaauuacccaag

SEQ ID NO: 529668 - RNA, 32 nt, Human
ugucuuuacuaaaaauacaaaaauuagccagg

SEQ ID NO: 529669 - RNA, 32 nt, Human
ugucuuuacuaaaaauacaaaaauuagccggg

SEQ ID NO: 529670 - RNA, 32 nt, Human
ugucuuuacuaaaaauacaaaaauuagcuggg

SEQ ID NO: 529671 - RNA, 32 nt, Human
ugucuuuacuaaaaauauaaaaauuagcuggg

SEQ ID NO: 529672 - RNA, 32 nt, Human
ugucuuuaucagaggucccucugccaggggga

SEQ ID NO: 529673 - RNA, 32 nt, Human
ugucuuucaccaggcuggcaaaagcagugcaa

SEQ ID NO: 529674 - RNA, 32 nt, Human
ugucuuucaccuguaaucccagcacuuuggga

SEQ ID NO: 529675 - RNA, 25 nt, Human
ugucuuucagaaggugacuuucaug

SEQ ID NO: 529676 - RNA, 32 nt, Human
ugucuuucauucacuaaugagacugugucuga

SEQ ID NO: 529677 - RNA, 32 nt, Human
ugucuuuccguggagcugucgccaugaagguc

SEQ ID NO: 529678 - RNA, 32 nt, Human
ugucuuuccucucacccagucaaggagucccu

SEQ ID NO: 529679 - RNA, 32 nt, Human
ugucuuuccucucccugccucccaccagacuu

SEQ ID NO: 529680 - RNA, 32 nt, Human
ugucuuuccucuuccuccuagcuggcuuuaca

SEQ ID NO: 529681 - RNA, 32 nt, Human
ugucuuucucaccucuccuucacuuuuccuag

SEQ ID NO: 529682 - RNA, 32 nt, Human
ugucuuucuccucuccuaagucuuugcuuucc

SEQ ID NO: 529683 - RNA, 32 nt, Human
ugucuuucuccucuccuacauccauuucuucc

SEQ ID NO: 529684 - RNA, 32 nt, Human
ugucuuucuccucuggagaguagaugcuugcu

SEQ ID NO: 529685 - RNA, 32 nt, Human
ugucuuucuccucuuccuauucugucaucucc

SEQ ID NO: 529686 - RNA, 32 nt, Human
ugucuuucuguggacucaacauucacuucgau

SEQ ID NO: 529687 - RNA, 32 nt, Human
ugucuuucuguggagcugucgccaugaagguc

SEQ ID NO: 529688 - RNA, 32 nt, Human
ugucuuugaacucugcaccuccuuccaggcca

SEQ ID NO: 529689 - RNA, 21 nt, Human
ugucuuugaagcugccuccgc

SEQ ID NO: 529690 - RNA, 32 nt, Human
ugucuuugagguucugacugguguuuuacaac

SEQ ID NO: 529691 - RNA, 21 nt, Human
ugucuuugauuuuuuguucca

SEQ ID NO: 529692 - RNA, 32 nt, Human
ugucuuugcccucuguuccuuccagagacuau

SEQ ID NO: 529693 - RNA, 32 nt, Human
ugucuuugccucccacuguucucuccacucuc

SEQ ID NO: 529694 - RNA, 32 nt, Human
ugucuuugcuguauuuugaaaaacacguguug

SEQ ID NO: 529695 - RNA, 32 nt, Human
ugucuuugcuguguuuuucuccacuucuaaau

SEQ ID NO: 529696 - RNA, 32 nt, Human
ugucuuuggaaaauuacaacacugccuuugca

SEQ ID NO: 529697 - RNA, 32 nt, Human
ugucuuuggcucuuuguagugugcagaaagca

SEQ ID NO: 529698 - RNA, 32 nt, Human
ugucuuugggccugggucuguccuccaagaga

SEQ ID NO: 529699 - RNA, 22 nt, Human
ugucuuugggguuuucuuccca

SEQ ID NO: 529700 - RNA, 24 nt, Human
ugucuuugguccaacguuguucca

SEQ ID NO: 529701 - RNA, 32 nt, Human
ugucuuugguucagcaguuuuauugugaguug

SEQ ID NO: 529702 - RNA, 32 nt, Human
ugucuuuguaagucagcaugcucuugcuugaa

SEQ ID NO: 529703 - RNA, 31 nt, Human
ugucuuuguccccagcccuggagccauccug

SEQ ID NO: 529704 - RNA, 22 nt, Human
ugucuuugucuugcuguuuuca

SEQ ID NO: 529705 - RNA, 32 nt, Human
ugucuuuguugguggaaguaucuacugaagua

SEQ ID NO: 529706 - RNA, 32 nt, Human
ugucuuuguuugcaaaccuuucucagagcgac

SEQ ID NO: 529707 - RNA, 32 nt, Human
ugucuuuuagccuucaacuuuguauccaucag

SEQ ID NO: 529708 - RNA, 32 nt, Human
ugucuuuuccucaccaccuucccuccaaaaca

SEQ ID NO: 529709 - RNA, 22 nt, Human
ugucuuuucuaaaaauacaaaa

SEQ ID NO: 529710 - RNA, 32 nt, Human
ugucuuuucuguuuuaaucauagaugaaucuu

SEQ ID NO: 529711 - RNA, 32 nt, Human
ugucuuuugccaggcuagagacagggagagca

SEQ ID NO: 529712 - RNA, 32 nt, Human
ugucuuuugccucugcaauucuuuuuguagcu

SEQ ID NO: 529713 - RNA, 32 nt, Human
ugucuuuuguucucaugaauagucacuggggc

SEQ ID NO: 529714 - RNA, 32 nt, Human
ugucuuuuucauuuuuaauuuauugucauaca

SEQ ID NO: 529715 - RNA, 32 nt, Human
ugugaaaaaccaagaaaaagauaugguuguau

SEQ ID NO: 529716 - RNA, 32 nt, Human
ugugaaaaagccuuuaaaugauugucacacuu

SEQ ID NO: 529717 - RNA, 32 nt, Human
ugugaaaacuuuuaacaguuacugaacuaugu

SEQ ID NO: 529718 - RNA, 32 nt, Human
ugugaaaagcugugauuucauuucuuaucagu

SEQ ID NO: 529719 - RNA, 26 nt, Human
ugugaaaaggcaaauuuguauaugua

SEQ ID NO: 529720 - RNA, 32 nt, Human
ugugaaaaguauacacaaagggcucugaagcu

SEQ ID NO: 529721 - RNA, 32 nt, Human
ugugaaaaucagcugguucugcugcuugguuu

SEQ ID NO: 529722 - RNA, 32 nt, Human
ugugaaacaaccugggcaacauggugaaaccc

SEQ ID NO: 529723 - RNA, 32 nt, Human
ugugaaacacuuaacuggacaaacuguaguuu

SEQ ID NO: 529724 - RNA, 32 nt, Human
ugugaaaccaauauuggcaaauaguacuuuaa

SEQ ID NO: 529725 - RNA, 32 nt, Human
ugugaaaccucacccuucuggagcacggggcc

SEQ ID NO: 529726 - RNA, 32 nt, Human
ugugaaacuauggcuuaacacuguuaaagacu

SEQ ID NO: 529727 - RNA, 32 nt, Human
ugugaaacugauuucagauugcugaccuccag

SEQ ID NO: 529728 - RNA, 32 nt, Human
ugugaaacuguaaauuucauacauuugacuuc

SEQ ID NO: 529729 - RNA, 32 nt, Human
ugugaaagaaaacgucagucugccuguaaauu

SEQ ID NO: 529730 - RNA, 32 nt, Human
ugugaaagaggaaugugggagauugggacagc

SEQ ID NO: 529731 - RNA, 32 nt, Human
ugugaaagcccccuucugcugccugcggcugg

SEQ ID NO: 529732 - RNA, 32 nt, Human
ugugaaagcugaugcccaugugcccugagagc

SEQ ID NO: 529733 - RNA, 32 nt, Human
ugugaaaggaacuuucagauuaagaaauuucu

SEQ ID NO: 529734 - RNA, 22 nt, Human
ugugaaaguaauauuuuuuaua

SEQ ID NO: 529735 - RNA, 32 nt, Human
ugugaaaguacuuggagaaacugaggccucuu

SEQ ID NO: 529736 - RNA, 32 nt, Human
ugugaaagugguggagggcaauggaagggaac

SEQ ID NO: 529737 - RNA, 32 nt, Human
ugugaaaguuuggaggagggaggcaggaggug

SEQ ID NO: 529738 - RNA, 32 nt, Human
ugugaaauaauuugggcuuaaaagugaacaua

SEQ ID NO: 529739 - RNA, 32 nt, Human
ugugaaauagccaaucuccaccaguccuguau

SEQ ID NO: 529740 - RNA, 23 nt, Human
ugugaaaugaugagggcauuuua

SEQ ID NO: 529741 - RNA, 32 nt, Human
ugugaaauggcaguaaggaagaaaacagaaua

SEQ ID NO: 529742 - RNA, 32 nt, Human
ugugaaauguggagacuuccacauucucaguu

SEQ ID NO: 529743 - RNA, 23 nt, Human
ugugaaauuauggaggaguuuua

SEQ ID NO: 529744 - RNA, 21 nt, Human
ugugaaauucucagaguguuu

SEQ ID NO: 529745 - RNA, 19 nt, Human
ugugaaauugcaaguguuu

SEQ ID NO: 529746 - RNA, 32 nt, Human
ugugaaauuggcucucugggggccaaggccuu

SEQ ID NO: 529747 - RNA, 22 nt, Human
ugugaaauuguguagaguguuu

SEQ ID NO: 529748 - RNA, 32 nt, Human
ugugaaauuuacuagcaaaauuaagcuuucau

SEQ ID NO: 529749 - RNA, 32 nt, Human
ugugaacacacacguguauacaugcaugcaca

SEQ ID NO: 529750 - RNA, 32 nt, Human
ugugaacagaagaacaacaacuccaccggaua

SEQ ID NO: 529751 - RNA, 32 nt, Human
ugugaacagagcagagugggaggcaggcauca

SEQ ID NO: 529752 - RNA, 32 nt, Human
ugugaacagcuccaccaccaagcgccugcaga

SEQ ID NO: 529753 - RNA, 32 nt, Human
ugugaacagcuguguucucauuuccuuuucuu

SEQ ID NO: 529754 - RNA, 32 nt, Human
ugugaacaguagugacuuuucccgcuguuucu

SEQ ID NO: 529755 - RNA, 32 nt, Human
ugugaaccauaggcacaacccaggaaguuucc

SEQ ID NO: 529756 - RNA, 32 nt, Human
ugugaaccauguccugagggccuugcagggaa

SEQ ID NO: 529757 - RNA, 32 nt, Human
ugugaacccaggaggcacagcuugcagugagc

SEQ ID NO: 529758 - RNA, 32 nt, Human
ugugaacccaggaggcagagcuugcagugagc

SEQ ID NO: 529759 - RNA, 32 nt, Human
ugugaacccaggaggcggagcuugcagugagc

SEQ ID NO: 529760 - RNA, 32 nt, Human
ugugaacccaggaggcggugcuugcagggagc

SEQ ID NO: 529761 - RNA, 32 nt, Human
ugugaaccccugcacccaaccccacaucuggg

SEQ ID NO: 529762 - RNA, 32 nt, Human
ugugaacccgggacgcagggguugcagugagc

SEQ ID NO: 529763 - RNA, 32 nt, Human
ugugaacccgggagauggcgcuugcagugagc

SEQ ID NO: 529764 - RNA, 32 nt, Human
ugugaacccgggagcggagguugcagugagcu

SEQ ID NO: 529765 - RNA, 32 nt, Human
ugugaacccgggaggcagagcuugcagugagc

SEQ ID NO: 529766 - RNA, 32 nt, Human
ugugaacccgggaggcagagcuuguggugagc

SEQ ID NO: 529767 - RNA, 32 nt, Human
ugugaacccgggaggcauagcuugcagugagc

SEQ ID NO: 529768 - RNA, 32 nt, Human
ugugaacccgggaggcggagcuugcagugagc

SEQ ID NO: 529769 - RNA, 32 nt, Human
ugugaacccgggagguggagcuuccagugagc

SEQ ID NO: 529770 - RNA, 32 nt, Human
ugugaacccgggagguggagcuugcagugagc

SEQ ID NO: 529771 - RNA, 32 nt, Human
ugugaacccguccucaccauguuugccacauc

SEQ ID NO: 529772 - RNA, 32 nt, Human
ugugaaccgccugcacugaauucacgugagga

SEQ ID NO: 529773 - RNA, 32 nt, Human
ugugaaccuagacuuagaacaaauccugcuuu

SEQ ID NO: 529774 - RNA, 32 nt, Human
ugugaaccugggaggcagagcuugcagugagc

SEQ ID NO: 529775 - RNA, 32 nt, Human
ugugaaccugggaggcggagcuugcaaugaac

SEQ ID NO: 529776 - RNA, 32 nt, Human
ugugaaccugggaggcggagcuugcagugagc

SEQ ID NO: 529777 - RNA, 32 nt, Human
ugugaaccugggagguggagcuugcagugaac

SEQ ID NO: 529778 - RNA, 32 nt, Human
ugugaaccugggagguggagcuugcagugagc

SEQ ID NO: 529779 - RNA, 32 nt, Human
ugugaaccugugagguggagcuugcagugagc

SEQ ID NO: 529780 - RNA, 32 nt, Human
ugugaaccuguguacgcacacacacauauaca

SEQ ID NO: 529781 - RNA, 32 nt, Human
ugugaacgccaaacuaaaguuuacagucuuuc

SEQ ID NO: 529782 - RNA, 32 nt, Human
ugugaacguguauguaccuaggauauguuaaa

SEQ ID NO: 529783 - RNA, 32 nt, Human
ugugaacguguguauguaaauguaugugugua

SEQ ID NO: 529784 - RNA, 32 nt, Human
ugugaacucaaggccuucccuaccucacccug

SEQ ID NO: 529785 - RNA, 32 nt, Human
ugugaacuccacuccacggcugcccagggcag

SEQ ID NO: 529786 - RNA, 32 nt, Human
ugugaacuccuugcaaagaugauaugaggcua

SEQ ID NO: 529787 - RNA, 32 nt, Human
ugugaacugcucaacacacagaucuccuacuc

SEQ ID NO: 529788 - RNA, 32 nt, Human
ugugaacuuaaagagaaggaauauuuguguag

SEQ ID NO: 529789 - RNA, 32 nt, Human
ugugaacuucacuaacagggaguggcaguguc

SEQ ID NO: 529790 - RNA, 32 nt, Human
ugugaacuuccccugcacugccagggccguuc

SEQ ID NO: 529791 - RNA, 32 nt, Human
ugugaacuucuguggcuucaguucucaugcug

SEQ ID NO: 529792 - RNA, 32 nt, Human
ugugaacuugcucaccuggaccacuguauccu

SEQ ID NO: 529793 - RNA, 32 nt, Human
ugugaagaaagaaaaguggagugcuguaucuu

SEQ ID NO: 529794 - RNA, 21 nt, Human
ugugaagaacuaaggugggga

SEQ ID NO: 529795 - RNA, 32 nt, Human
ugugaagaacugcuacauauucuacagugcuu

SEQ ID NO: 529796 - RNA, 32 nt, Human
ugugaagaaggaccagcugcuguuuagaaaau

SEQ ID NO: 529797 - RNA, 32 nt, Human
ugugaagaaggugccuuucuuccccuucgccu

SEQ ID NO: 529798 - RNA, 23 nt, Human
ugugaagaaucuguugcuaugua

SEQ ID NO: 529799 - RNA, 32 nt, Human
ugugaagaauugaggcaugcaacccaauagca

SEQ ID NO: 529800 - RNA, 32 nt, Human
ugugaagacaggcuucuuggaguaggggcagc

SEQ ID NO: 529801 - RNA, 32 nt, Human
ugugaagacagggagagccaggccccagcaga

SEQ ID NO: 529802 - RNA, 32 nt, Human
ugugaagacuguuuccagccuggcugugagcc

SEQ ID NO: 529803 - RNA, 32 nt, Human
ugugaagagacgccccacccacccucagccag

SEQ ID NO: 529804 - RNA, 32 nt, Human
ugugaagagcaccugucacaacaggaaaugca

SEQ ID NO: 529805 - RNA, 32 nt, Human
ugugaagagcugggugaagggguuggagcaug

SEQ ID NO: 529806 - RNA, 32 nt, Human
ugugaagaggcaggcacagaaaaucuauccau

SEQ ID NO: 529807 - RNA, 32 nt, Human
ugugaagaggccugagagcgggagggccaggc

SEQ ID NO: 529808 - RNA, 20 nt, Human
ugugaagaggugccuuccac

SEQ ID NO: 529809 - RNA, 32 nt, Human
ugugaagaucgccagagaguucuguguuucau

SEQ ID NO: 529810 - RNA, 32 nt, Human
ugugaagaugcagaauugccuccuggacugaa

SEQ ID NO: 529811 - RNA, 32 nt, Human
ugugaagaugucuuccucucggacccucugcu

SEQ ID NO: 529812 - RNA, 32 nt, Human
ugugaagaugugggugacacagggggacagga

SEQ ID NO: 529813 - RNA, 32 nt, Human
ugugaagcaaaaagaugccuuuuaccaugaau

SEQ ID NO: 529814 - RNA, 32 nt, Human
ugugaagcacacagcucugcagccugggcucu

SEQ ID NO: 529815 - RNA, 32 nt, Human
ugugaagcagaagagaaaagcuggaggaaggc

SEQ ID NO: 529816 - RNA, 32 nt, Human
ugugaagccagaggaccuggagcugcugaugc

SEQ ID NO: 529817 - RNA, 32 nt, Human
ugugaagcccaggaggugguguuggcugcagg

SEQ ID NO: 529818 - RNA, 32 nt, Human
ugugaagcccagggcaagaggaugcggguguc

SEQ ID NO: 529819 - RNA, 32 nt, Human
ugugaagcccuggaagggcucuugccuagaau

SEQ ID NO: 529820 - RNA, 32 nt, Human
ugugaagccugucacccagaacuggaugguac

SEQ ID NO: 529821 - RNA, 32 nt, Human
ugugaagcuagcacugucuguaauacuucuaa

SEQ ID NO: 529822 - RNA, 32 nt, Human
ugugaagcugagcucagggccggaccugggga

SEQ ID NO: 529823 - RNA, 32 nt, Human
ugugaagcuuuuccuuuagccugggacagaag

SEQ ID NO: 529824 - RNA, 32 nt, Human
ugugaaggaaggcaggagccugcaggggagca

SEQ ID NO: 529825 - RNA, 32 nt, Human
ugugaaggaauugagccagaucucucucccua

SEQ ID NO: 529826 - RNA, 32 nt, Human
ugugaaggacccugaaccagaggacucagcga

SEQ ID NO: 529827 - RNA, 32 nt, Human
ugugaaggacucacuuuuacugggauaaacaa

SEQ ID NO: 529828 - RNA, 32 nt, Human
ugugaaggagcuugugaaggcagaggaagauu

SEQ ID NO: 529829 - RNA, 32 nt, Human
ugugaaggaggcagggguugggacaagugcua

SEQ ID NO: 529830 - RNA, 21 nt, Human
ugugaaggcagaguaugggga

SEQ ID NO: 529831 - RNA, 32 nt, Human
ugugaaggccccgagcccuggaagcccagacu

SEQ ID NO: 529832 - RNA, 32 nt, Human
ugugaaggccugaaacaggcaaauuugugauc

SEQ ID NO: 529833 - RNA, 32 nt, Human
ugugaagggagaaagggagagaaaacucuucu

SEQ ID NO: 529834 - RNA, 32 nt, Human
ugugaagggauuagaugggauggucucugagg

SEQ ID NO: 529835 - RNA, 32 nt, Human
ugugaagggcugggaccacuugcccagacugg

SEQ ID NO: 529836 - RNA, 21 nt, Human
ugugaagggggagaugggaga

SEQ ID NO: 529837 - RNA, 21 nt, Human
ugugaagguccagucauucca

SEQ ID NO: 529838 - RNA, 32 nt, Human
ugugaagguggaaucagagaggggccccgcgg

SEQ ID NO: 529839 - RNA, 32 nt, Human
ugugaaggugugugucauacacagggccuagu

SEQ ID NO: 529840 - RNA, 32 nt, Human
ugugaaguaaccaggaggaauggggaaagaag

SEQ ID NO: 529841 - RNA, 32 nt, Human
ugugaagucuugacacugccuccugggagcau

SEQ ID NO: 529842 - RNA, 32 nt, Human
ugugaagugagaagaaacuuuaugcuuguuua

SEQ ID NO: 529843 - RNA, 32 nt, Human
ugugaagugauggagaccauggacagugauau

SEQ ID NO: 529844 - RNA, 32 nt, Human
ugugaaguggagaggccgaggagcagccggcc

SEQ ID NO: 529845 - RNA, 32 nt, Human
ugugaagugguucacccuugaggaccaggagc

SEQ ID NO: 529846 - RNA, 21 nt, Human
ugugaauaaacuguucuucau

SEQ ID NO: 529847 - RNA, 32 nt, Human
ugugaauaaaguguucuacagucagccagcac

SEQ ID NO: 529848 - RNA, 32 nt, Human
ugugaauagccacugcacuccagccugggcaa

SEQ ID NO: 529849 - RNA, 32 nt, Human
ugugaauagccacugcacuccaucuugggcaa

SEQ ID NO: 529850 - RNA, 32 nt, Human
ugugaauagccacugcacucuagucuggggaa

SEQ ID NO: 529851 - RNA, 32 nt, Human
ugugaauagccacugcacuucagccugggcaa

SEQ ID NO: 529852 - RNA, 32 nt, Human
ugugaauaugaucuuucucucagaauaccuua

SEQ ID NO: 529853 - RNA, 32 nt, Human
ugugaauaugugaaacaguaaauaugaaagaa

SEQ ID NO: 529854 - RNA, 32 nt, Human
ugugaauauuagcuuuugugaucagaauuaug

SEQ ID NO: 529855 - RNA, 32 nt, Human
ugugaauauucaaugggaccaauaugaacaca

SEQ ID NO: 529856 - RNA, 32 nt, Human
ugugaaucacugcaggcuguguucuugcaucu

SEQ ID NO: 529857 - RNA, 32 nt, Human
ugugaaucagcaggugccccgaggccaggccu

SEQ ID NO: 529858 - RNA, 32 nt, Human
ugugaaucagccuccccacucuccuuggucau

SEQ ID NO: 529859 - RNA, 32 nt, Human
ugugaaucaguacaguuuucuuacccuuucuu

SEQ ID NO: 529860 - RNA, 32 nt, Human
ugugaaucuccaagugccuguguaauaaauaa

SEQ ID NO: 529861 - RNA, 32 nt, Human
ugugaaucucuccaaagccaacucaguucauc

SEQ ID NO: 529862 - RNA, 31 nt, Human
ugugaaucucuucucccuuugaagaaacuau

SEQ ID NO: 529863 - RNA, 32 nt, Human
ugugaaucugcaauggcugaaaagaguuguga

SEQ ID NO: 529864 - RNA, 32 nt, Human
ugugaaucugcuuuuccucugccuucggaggg

SEQ ID NO: 529865 - RNA, 32 nt, Human
ugugaaucuucaugaggccaucuugcuuuguc

SEQ ID NO: 529866 - RNA, 32 nt, Human
ugugaaugaaauggaugucacagagugucaug

SEQ ID NO: 529867 - RNA, 32 nt, Human
ugugaaugacaaagugcuacugccucaauaac

SEQ ID NO: 529868 - RNA, 32 nt, Human
ugugaaugacaucugaagguguuaucuuacac

SEQ ID NO: 529869 - RNA, 32 nt, Human
ugugaaugacccccuuccccaggcauccccac

SEQ ID NO: 529870 - RNA, 32 nt, Human
ugugaaugagugugugcacaugagugcacggg

SEQ ID NO: 529871 - RNA, 23 nt, Human
ugugaaugaugagcugccuccau

SEQ ID NO: 529872 - RNA, 30 nt, Human
ugugaaugaugggcucuuggaagcacuguc

SEQ ID NO: 529873 - RNA, 32 nt, Human
ugugaaugcaccacggcacucaagccugggca

SEQ ID NO: 529874 - RNA, 32 nt, Human
ugugaaugccgcguccuguccuggugacagga

SEQ ID NO: 529875 - RNA, 32 nt, Human
ugugaauggccuuccacuucagucuuaggcag

SEQ ID NO: 529876 - RNA, 32 nt, Human
ugugaaugguagacauuuaucacaugugauau

SEQ ID NO: 529877 - RNA, 32 nt, Human
ugugaauguguauguauacuuacauaugugug

SEQ ID NO: 529878 - RNA, 32 nt, Human
ugugaauuacuuuugagauaaccgcauuaaca

SEQ ID NO: 529879 - RNA, 32 nt, Human
ugugaauuaggaccagcgcaaugaaugcucaa

SEQ ID NO: 529880 - RNA, 32 nt, Human
ugugaauuaguugcugcacuccagccuaggca

SEQ ID NO: 529881 - RNA, 32 nt, Human
ugugaauucugucauugccaaccuucuugaag

SEQ ID NO: 529882 - RNA, 32 nt, Human
ugugaauugccacugcacuccagccuaagcaa

SEQ ID NO: 529883 - RNA, 32 nt, Human
ugugaauugguccucagauagucaggccuggg

SEQ ID NO: 529884 - RNA, 32 nt, Human
ugugaauuguguaacaaaaacauguucuuaua

SEQ ID NO: 529885 - RNA, 32 nt, Human
ugugaauuucugugacuuccacaugccaaaau

SEQ ID NO: 529886 - RNA, 21 nt, Human
ugugacaaaaccuuuaagcca

SEQ ID NO: 529887 - RNA, 32 nt, Human
ugugacaaagcuuucagacacaauucagcccu

SEQ ID NO: 529888 - RNA, 32 nt, Human
ugugacaacucuagaccugccugcuuuaucua

SEQ ID NO: 529889 - RNA, 32 nt, Human
ugugacaaggucuuacccagcccagggauucu

SEQ ID NO: 529890 - RNA, 32 nt, Human
ugugacaagguggucuugucacacaaccaagg

SEQ ID NO: 529891 - RNA, 21 nt, Human
ugugacaauauaugcuguaga

SEQ ID NO: 529892 - RNA, 22 nt, Human
ugugacaauauauuuuauguau

SEQ ID NO: 529893 - RNA, 32 nt, Human
ugugacaauauugaaacaccacugugcagauu

SEQ ID NO: 529894 - RNA, 20 nt, Human
ugugacaaucugccuuucac

SEQ ID NO: 529895 - RNA, 32 nt, Human
ugugacaaugcccacuccucauucauaaggug

SEQ ID NO: 529896 - RNA, 32 nt, Human
ugugacacccccucgacucccuggugacgcuc

SEQ ID NO: 529897 - RNA, 32 nt, Human
ugugacaccuucagcaggucucagggaagaug

SEQ ID NO: 529898 - RNA, 32 nt, Human
ugugacacucgagucugagccagccccucagg

SEQ ID NO: 529899 - RNA, 32 nt, Human
ugugacacugcacuccagccugggcaacagag

SEQ ID NO: 529900 - RNA, 32 nt, Human
ugugacacugcccuccagccugggugacagag

SEQ ID NO: 529901 - RNA, 32 nt, Human
ugugacacugugggugaaauguucuacacacc

SEQ ID NO: 529902 - RNA, 32 nt, Human
ugugacagacacauuuucuuagccuucaccuu

SEQ ID NO: 529903 - RNA, 32 nt, Human
ugugacagagaagggauagggaaauccucucu

SEQ ID NO: 529904 - RNA, 32 nt, Human
ugugacagagcagagccagggccaggcgcacc

SEQ ID NO: 529905 - RNA, 32 nt, Human
ugugacagaguuucuuucugacaccugagucu

SEQ ID NO: 529906 - RNA, 32 nt, Human
ugugacagccauugugagacugaugcacaaac

SEQ ID NO: 529907 - RNA, 32 nt, Human
ugugacagcggggauggaugugaccuugcccg

SEQ ID NO: 529908 - RNA, 32 nt, Human
ugugacaggaggcagcagaaguugcagagaag

SEQ ID NO: 529909 - RNA, 32 nt, Human
ugugacaggcccugccugccacccuaggcagg

SEQ ID NO: 529910 - RNA, 32 nt, Human
ugugacaggggcaggaggagugugcuagaacc

SEQ ID NO: 529911 - RNA, 32 nt, Human
ugugacagguaacaaauuuggggaagacagca

SEQ ID NO: 529912 - RNA, 32 nt, Human
ugugacagucacugcauuugccugcuucuuuc

SEQ ID NO: 529913 - RNA, 32 nt, Human
ugugacagucucuauucugucguuuugcuccu

SEQ ID NO: 529914 - RNA, 32 nt, Human
ugugacagugccuugucguccucuuugaaaca

SEQ ID NO: 529915 - RNA, 32 nt, Human
ugugacauagauuauacuacuacuaauuuuug

SEQ ID NO: 529916 - RNA, 32 nt, Human
ugugacauccccaccagccucagaugagacgg

SEQ ID NO: 529917 - RNA, 32 nt, Human
ugugacaucugcaagccaaggagagaggcugc

SEQ ID NO: 529918 - RNA, 32 nt, Human
ugugacaucuggauauaaaaugaaaauaaaug

SEQ ID NO: 529919 - RNA, 32 nt, Human
ugugacaugaagcaacagaaacugagaucaaa

SEQ ID NO: 529920 - RNA, 32 nt, Human
ugugacaugcuggccucagagauucaugucac

SEQ ID NO: 529921 - RNA, 32 nt, Human
ugugacauuucuagcauauccaaggcaccacc

SEQ ID NO: 529922 - RNA, 32 nt, Human
ugugaccaagaguucaggggcccagguaccuu

SEQ ID NO: 529923 - RNA, 32 nt, Human
ugugaccaagugacaaacuccuucugaaccug

SEQ ID NO: 529924 - RNA, 32 nt, Human
ugugaccacacaccugguuuuaacucaagacc

SEQ ID NO: 529925 - RNA, 32 nt, Human
ugugaccacagcugcucuccaggugcugggcc

SEQ ID NO: 529926 - RNA, 32 nt, Human
ugugaccacaggcugguguguaggugguaaaa

SEQ ID NO: 529927 - RNA, 32 nt, Human
ugugaccaccacacuccaggaggcagccccau

SEQ ID NO: 529928 - RNA, 32 nt, Human
ugugaccacuuucccccacccuucccacccuc

SEQ ID NO: 529929 - RNA, 32 nt, Human
ugugaccagaaagcuucauccacagccuugca

SEQ ID NO: 529930 - RNA, 21 nt, Human
ugugaccagacugaauuuccu

SEQ ID NO: 529931 - RNA, 32 nt, Human
ugugaccagcucccaguaaaaaccccaggcac

SEQ ID NO: 529932 - RNA, 32 nt, Human
ugugaccaguguccaagggcaucccauucuca

SEQ ID NO: 529933 - RNA, 32 nt, Human
ugugaccauaacuguuuaggcuucuguguguu

SEQ ID NO: 529934 - RNA, 32 nt, Human
ugugaccaucuuuccugagcaccaagggcuuc

SEQ ID NO: 529935 - RNA, 32 nt, Human
ugugaccaugaucuguugauaucuuugaaucu

SEQ ID NO: 529936 - RNA, 32 nt, Human
ugugacccaagccgagcguggaagaauggggu

SEQ ID NO: 529937 - RNA, 32 nt, Human
ugugacccaaguggcccggaccaguuuggggc

SEQ ID NO: 529938 - RNA, 32 nt, Human
ugugaccccaaaccaucucuccaaagcauuaa

SEQ ID NO: 529939 - RNA, 32 nt, Human
ugugaccccauucuguaaucaacugagcuagu

SEQ ID NO: 529940 - RNA, 32 nt, Human
ugugacccccuucaagucuuccuucaccacuc

SEQ ID NO: 529941 - RNA, 32 nt, Human
ugugaccccucgggacugccuggugcaggugg

SEQ ID NO: 529942 - RNA, 32 nt, Human
ugugacccguggucaacuuuaacaucagcaaa

SEQ ID NO: 529943 - RNA, 32 nt, Human
ugugacccuucuucccccuccucucuccucuc

SEQ ID NO: 529944 - RNA, 32 nt, Human
ugugaccgagggagggagggcugccugauccc

SEQ ID NO: 529945 - RNA, 18 nt, Human
ugugaccgccugaugucc

SEQ ID NO: 529946 - RNA, 32 nt, Human
ugugaccuagggugaugaguucaccucucugg

SEQ ID NO: 529947 - RNA, 32 nt, Human
ugugaccucaucuuucucauggugcuauccug

SEQ ID NO: 529948 - RNA, 32 nt, Human
ugugaccuccggagcccugccugccccugcuc

SEQ ID NO: 529949 - RNA, 32 nt, Human
ugugaccugacaccugccgcugcuugagugga

SEQ ID NO: 529950 - RNA, 31 nt, Human
ugugaccugcaacgggguggcauucacuuag

SEQ ID NO: 529951 - RNA, 32 nt, Human
ugugaccugcagcugacucaaagccuugcgug

SEQ ID NO: 529952 - RNA, 32 nt, Human
ugugaccugcaggagcuggaggcgggcgggaa

SEQ ID NO: 529953 - RNA, 32 nt, Human
ugugaccugcucucuucccuccaggcugacuu

SEQ ID NO: 529954 - RNA, 32 nt, Human
ugugaccugcugucugcacccuguugucugca

SEQ ID NO: 529955 - RNA, 32 nt, Human
ugugaccuuaggcuggagugcaauggcaugau

SEQ ID NO: 529956 - RNA, 32 nt, Human
ugugaccuuuguccucacauauguuaucacuc

SEQ ID NO: 529957 - RNA, 32 nt, Human
ugugacgaaaugccagcugaggcacaugccuu

SEQ ID NO: 529958 - RNA, 32 nt, Human
ugugacgaggccuggccaggggugcaggagca

SEQ ID NO: 529959 - RNA, 32 nt, Human
ugugacgaugccacugcagcccgcaccuuguc

SEQ ID NO: 529960 - RNA, 32 nt, Human
ugugacgccacagccuggugaggagggggcug

SEQ ID NO: 529961 - RNA, 32 nt, Human
ugugacggcagugccuacacgccaagguaaga

SEQ ID NO: 529962 - RNA, 32 nt, Human
ugugacggccuccagcccacaggccugcuuuc

SEQ ID NO: 529963 - RNA, 32 nt, Human
ugugacggggcuggggcugagcuuucuggggg

SEQ ID NO: 529964 - RNA, 32 nt, Human
ugugacgucugagaccuuuucccagcuggagc

SEQ ID NO: 529965 - RNA, 32 nt, Human
ugugacguggaagacgccgaagaggugaggga

SEQ ID NO: 529966 - RNA, 32 nt, Human
ugugacuacccacuccaaagguugacuguaag

SEQ ID NO: 529967 - RNA, 32 nt, Human
ugugacuagcuacugcacuccaaccugggcaa

SEQ ID NO: 529968 - RNA, 19 nt, Human
ugugacucaaggccugcug

SEQ ID NO: 529969 - RNA, 32 nt, Human
ugugacucagaaaauccacaacuuuuuaccau

SEQ ID NO: 529970 - RNA, 24 nt, Human
ugugacuccacacccagcaugucu

SEQ ID NO: 529971 - RNA, 32 nt, Human
ugugacucccacugcacuccagcucggggaac

SEQ ID NO: 529972 - RNA, 32 nt, Human
ugugacuccccaggaccagggagauguuuaug

SEQ ID NO: 529973 - RNA, 32 nt, Human
ugugacucgggagacggaguggaacacccggc

SEQ ID NO: 529974 - RNA, 32 nt, Human
ugugacucuaagaacaaauggaugaaugaaua

SEQ ID NO: 529975 - RNA, 32 nt, Human
ugugacucucucucuaaugcugcucucgggaa

SEQ ID NO: 529976 - RNA, 32 nt, Human
ugugacucugacuggcuauagucucuggcacc

SEQ ID NO: 529977 - RNA, 32 nt, Human
ugugacugaaagaugaaguucaagagaaggga

SEQ ID NO: 529978 - RNA, 32 nt, Human
ugugacugauucucuuuugcauugguuuuuag

SEQ ID NO: 529979 - RNA, 32 nt, Human
ugugacugcaccacugcacagucugggcgaca

SEQ ID NO: 529980 - RNA, 22 nt, Human
ugugacugccagcugcuuccgc

SEQ ID NO: 529981 - RNA, 25 nt, Human
ugugacugccaggauaaagcuuccg

SEQ ID NO: 529982 - RNA, 32 nt, Human
ugugacugcccaggacucucagguugggcugg

SEQ ID NO: 529983 - RNA, 32 nt, Human
ugugacugccgcucugugccuaugucuugcuu

SEQ ID NO: 529984 - RNA, 32 nt, Human
ugugacugcgccacugcacuccagucugggac

SEQ ID NO: 529985 - RNA, 32 nt, Human
ugugacugcucacuuaugacgucucccccagu

SEQ ID NO: 529986 - RNA, 21 nt, Human
ugugacuggcccgggcuuccg

SEQ ID NO: 529987 - RNA, 19 nt, Human
ugugacuggcuucuuccac

SEQ ID NO: 529988 - RNA, 32 nt, Human
ugugacugggaaggcaauuucauacuaaacug

SEQ ID NO: 529989 - RNA, 32 nt, Human
ugugacugggcugugugaggguggggugggag

SEQ ID NO: 529990 - RNA, 32 nt, Human
ugugacuguaguccaccccugccugccuuguu

SEQ ID NO: 529991 - RNA, 32 nt, Human
ugugacuguaucauuaacugcuuuuguuuugc

SEQ ID NO: 529992 - RNA, 22 nt, Human
ugugacugugacagagcugucc

SEQ ID NO: 529993 - RNA, 32 nt, Human
ugugacuguggacgugcagucuccagcuugua

SEQ ID NO: 529994 - RNA, 23 nt, Human
ugugacuuaauuacacaugaaua

SEQ ID NO: 529995 - RNA, 32 nt, Human
ugugacuucaugauaggaaagaggaggaugag

SEQ ID NO: 529996 - RNA, 32 nt, Human
ugugacuugucccaggaccagaauguaccuaa

SEQ ID NO: 529997 - RNA, 32 nt, Human
ugugacuuucagugggagauggaaguuuuuca

SEQ ID NO: 529998 - RNA, 32 nt, Human
ugugacuuugcuucuuuuccugcucagcuucu

SEQ ID NO: 529999 - RNA, 18 nt, Human
ugugagaaaauaccuccc

SEQ ID NO: 530000 - RNA, 31 nt, Human
ugugagaaagcgagagaaagaggaacugaag

SEQ ID NO: 530001 - RNA, 32 nt, Human
ugugagaaaggugccuuucuucccccuucacg

SEQ ID NO: 530002 - RNA, 32 nt, Human
ugugagaaauccagcaucucaggcuccacugc

SEQ ID NO: 530003 - RNA, 32 nt, Human
ugugagaaaucuugcuaaucuauaugccacag

SEQ ID NO: 530004 - RNA, 21 nt, Human
ugugagaacaaauaccuuccu

SEQ ID NO: 530005 - RNA, 32 nt, Human
ugugagaacauggcugguagaggcucuagcug

SEQ ID NO: 530006 - RNA, 32 nt, Human
ugugagaacauguguaaugugugugcagacau

SEQ ID NO: 530007 - RNA, 32 nt, Human
ugugagaacgugacuaacugcugguaaguuuc

SEQ ID NO: 530008 - RNA, 32 nt, Human
ugugagaagcaacaccuugcucuggucaggaa

SEQ ID NO: 530009 - RNA, 21 nt, Human
ugugagaagcagagauaggga

SEQ ID NO: 530010 - RNA, 32 nt, Human
ugugagaagcagagauagggagaggaggugag

SEQ ID NO: 530011 - RNA, 21 nt, Human
ugugagaagcagcagagggga

SEQ ID NO: 530012 - RNA, 32 nt, Human
ugugagaaggcucauuucucauguuauccgga

SEQ ID NO: 530013 - RNA, 32 nt, Human
ugugagaaguucuccccugggguggggacucg

SEQ ID NO: 530014 - RNA, 32 nt, Human
ugugagaaugauuguucuuucacuugggcugu

SEQ ID NO: 530015 - RNA, 32 nt, Human
ugugagaaugcaaacccgaagccagacgcaca

SEQ ID NO: 530016 - RNA, 32 nt, Human
ugugagacaaagggcccugucacuggaagcca

SEQ ID NO: 530017 - RNA, 32 nt, Human
ugugagacaacugcacuccagugugggcgugc

SEQ ID NO: 530018 - RNA, 32 nt, Human
ugugagacagcccacauuggaaaauccagaaa

SEQ ID NO: 530019 - RNA, 32 nt, Human
ugugagaccaaaggaggagagauguguuuugu

SEQ ID NO: 530020 - RNA, 32 nt, Human
ugugagaccagcccagccaacauggucccagg

SEQ ID NO: 530021 - RNA, 32 nt, Human
ugugagaccaucauggugccagucuaggaccc

SEQ ID NO: 530022 - RNA, 19 nt, Human
ugugagaccugcucuucac

SEQ ID NO: 530023 - RNA, 32 nt, Human
ugugagacucucccaaggugcuguauuuuucu

SEQ ID NO: 530024 - RNA, 32 nt, Human
ugugagacuggcgcugccaccauguuccccag

SEQ ID NO: 530025 - RNA, 32 nt, Human
ugugagagacacacacaaacacauuucaaaca

SEQ ID NO: 530026 - RNA, 32 nt, Human
ugugagagaggguauugagucuggccugacaa

SEQ ID NO: 530027 - RNA, 32 nt, Human
ugugagagaggugguaauuacaggaaccagcc

SEQ ID NO: 530028 - RNA, 32 nt, Human
ugugagagcagugcuucugauccugcugucac

SEQ ID NO: 530029 - RNA, 32 nt, Human
ugugagagccugggugucugagaccgggaggg

SEQ ID NO: 530030 - RNA, 22 nt, Human
ugugagagggacugcguuugca

SEQ ID NO: 530031 - RNA, 32 nt, Human
ugugagauaaaauugcuugucuuucacuggaa

SEQ ID NO: 530032 - RNA, 32 nt, Human
ugugagauaagaaagaguuccuggaaccagga

SEQ ID NO: 530033 - RNA, 32 nt, Human
ugugagauccaccccugcccgcaaaacauugc

SEQ ID NO: 530034 - RNA, 32 nt, Human
ugugagaucuccaggacagagggagaaagauc

SEQ ID NO: 530035 - RNA, 32 nt, Human
ugugagaugaaugcaaacaucacaaagaaguu

SEQ ID NO: 530036 - RNA, 32 nt, Human
ugugagaugaaugcacacaucacaaagaaguu

SEQ ID NO: 530037 - RNA, 32 nt, Human
ugugagauggaaaaguuguuucauggcaucca

SEQ ID NO: 530038 - RNA, 32 nt, Human
ugugagauuaaccuugggacacaguggguuag

SEQ ID NO: 530039 - RNA, 32 nt, Human
ugugagauuccuggcugccucuuccaggcagu

SEQ ID NO: 530040 - RNA, 32 nt, Human
ugugagcacacagagaaaagaccaugugaaga

SEQ ID NO: 530041 - RNA, 32 nt, Human
ugugagcacacgcuggagugcagcguuccaaa

SEQ ID NO: 530042 - RNA, 32 nt, Human
ugugagcacacgugcccaugggcguacacgua

SEQ ID NO: 530043 - RNA, 32 nt, Human
ugugagcaccacugcacuaagccagugcggag

SEQ ID NO: 530044 - RNA, 32 nt, Human
ugugagcacccagcuacuggggacgggggcuc

SEQ ID NO: 530045 - RNA, 32 nt, Human
ugugagcaccugagcaugaaacucgacgcguu

SEQ ID NO: 530046 - RNA, 32 nt, Human
ugugagcacuagcucuggaggcaggugaguca

SEQ ID NO: 530047 - RNA, 32 nt, Human
ugugagcacuccccucuccguugugcccugga

SEQ ID NO: 530048 - RNA, 32 nt, Human
ugugagcagaaggcuucccaacucacccgucu

SEQ ID NO: 530049 - RNA, 32 nt, Human
ugugagcagguccacuucuccacccacugaga

SEQ ID NO: 530050 - RNA, 32 nt, Human
ugugagcauuagaccagccacagugccugauu

SEQ ID NO: 530051 - RNA, 32 nt, Human
ugugagccacagcaccuggccaaccaacacuu

SEQ ID NO: 530052 - RNA, 32 nt, Human
ugugagccacaugacuaugaauacugcugucc

SEQ ID NO: 530053 - RNA, 32 nt, Human
ugugagccaccacacccagccucuguaguucu

SEQ ID NO: 530054 - RNA, 32 nt, Human
ugugagccaccacacccagccugggucucucu

SEQ ID NO: 530055 - RNA, 32 nt, Human
ugugagccaccacgcccagccuguggccagca

SEQ ID NO: 530056 - RNA, 32 nt, Human
ugugagccaccgcacccagccugaguuucucu

SEQ ID NO: 530057 - RNA, 18 nt, Human
ugugagccaccgcugcca

SEQ ID NO: 530058 - RNA, 32 nt, Human
ugugagccacggcacccagccuagcucucaga

SEQ ID NO: 530059 - RNA, 32 nt, Human
ugugagccacugcacccagccugugauguuuc

SEQ ID NO: 530060 - RNA, 32 nt, Human
ugugagccacugcacccagcugagagugcuuc

SEQ ID NO: 530061 - RNA, 32 nt, Human
ugugagccacugcacccggccacaagauguaa

SEQ ID NO: 530062 - RNA, 32 nt, Human
ugugagccacugcacccggccgggaauuuauc

SEQ ID NO: 530063 - RNA, 32 nt, Human
ugugagccacugcaccucgccagauguccaau

SEQ ID NO: 530064 - RNA, 32 nt, Human
ugugagccacugcaccuggcaagaaacuuuuc

SEQ ID NO: 530065 - RNA, 32 nt, Human
ugugagccacugcaccuggcagugaugucauu

SEQ ID NO: 530066 - RNA, 32 nt, Human
ugugagccacugcaccuggccaugguuaguug

SEQ ID NO: 530067 - RNA, 32 nt, Human
ugugagccacugcaccuggccccagaaauuau

SEQ ID NO: 530068 - RNA, 32 nt, Human
ugugagccacugcaccuggccuggagcucagu

SEQ ID NO: 530069 - RNA, 32 nt, Human
ugugagccacugccuggccuggccguagguuu

SEQ ID NO: 530070 - RNA, 32 nt, Human
ugugagccacugcgcccagccuauacauguua

SEQ ID NO: 530071 - RNA, 32 nt, Human
ugugagccacugcgccuggacugaguguuugu

SEQ ID NO: 530072 - RNA, 32 nt, Human
ugugagccacugugcccagcaguuucccagaa

SEQ ID NO: 530073 - RNA, 32 nt, Human
ugugagccacugugcccagccuaauugcagua

SEQ ID NO: 530074 - RNA, 32 nt, Human
ugugagccacugugccuggccuccggugagua

SEQ ID NO: 530075 - RNA, 32 nt, Human
ugugagccacuguguccagccuguaacuauua

SEQ ID NO: 530076 - RNA, 32 nt, Human
ugugagccagagagcagaaggaagugagggag

SEQ ID NO: 530077 - RNA, 32 nt, Human
ugugagccagcaccaggcaacccggcccuugu

SEQ ID NO: 530078 - RNA, 32 nt, Human
ugugagccagccuggcccuguacagaugugga

SEQ ID NO: 530079 - RNA, 32 nt, Human
ugugagccaggaauggauuuucuugaaacagc

SEQ ID NO: 530080 - RNA, 32 nt, Human
ugugagcccagccuguggucuucuccguaccc

SEQ ID NO: 530081 - RNA, 18 nt, Human
ugugagcccccugaugcc

SEQ ID NO: 530082 - RNA, 32 nt, Human
ugugagccgcuagugauggagagcagagggag

SEQ ID NO: 530083 - RNA, 32 nt, Human
ugugagccgugugcugcaucugugcuagcuca

SEQ ID NO: 530084 - RNA, 32 nt, Human
ugugagccugcaggaaaguuuaccaaaugcug

SEQ ID NO: 530085 - RNA, 18 nt, Human
ugugugguucugggcuua

SEQ ID NO: 530086 - RNA, 32 nt, Human
ugugugguuggaguucucccuacacaucucgu

SEQ ID NO: 530087 - RNA, 22 nt, Human
uguguguacauauauauacaca

SEQ ID NO: 530088 - RNA, 32 nt, Human
uguguguacgugaccacguucuaucuguucau

SEQ ID NO: 530089 - RNA, 32 nt, Human
uguguguagacagggucccacuguguugcuca

SEQ ID NO: 530090 - RNA, 32 nt, Human
uguguguagagacauaaaggagggugauguga

SEQ ID NO: 530091 - RNA, 32 nt, Human
uguguguagccugucuccuagucugccuaugu

SEQ ID NO: 530092 - RNA, 32 nt, Human
uguguguagggugguagaggccaaggugcugc

SEQ ID NO: 530093 - RNA, 32 nt, Human
uguguguagucucuugguuaaagugaagaaac

SEQ ID NO: 530094 - RNA, 32 nt, Human
uguguguagucucuugguuaaagugaagaaca

SEQ ID NO: 530095 - RNA, 32 nt, Human
uguguguauacaauaugaagaaugaucugaag

SEQ ID NO: 530096 - RNA, 24 nt, Human
uguguguauaugcauaaacauaua

SEQ ID NO: 530097 - RNA, 32 nt, Human
uguguguauauguauguguguaugggugugug

SEQ ID NO: 530098 - RNA, 32 nt, Human
uguguguauauguauguuuugaauauguuuuc

SEQ ID NO: 530099 - RNA, 32 nt, Human
uguguguauguauguauguacuuuagcauuac

SEQ ID NO: 530100 - RNA, 32 nt, Human
uguguguauguguauuuauauguauguaugua

SEQ ID NO: 530101 - RNA, 32 nt, Human
uguguguauuuuuaguagagaugggguuuuac

SEQ ID NO: 530102 - RNA, 32 nt, Human
ugugugucaaagagagugaggaagagaaggag

SEQ ID NO: 530103 - RNA, 32 nt, Human
ugugugucaccccaggaggcugcugcuaugau

SEQ ID NO: 530104 - RNA, 32 nt, Human
ugugugucacuguuuucuugcuuuauagauag

SEQ ID NO: 530105 - RNA, 32 nt, Human
ugugugucagcucugugugggugcucacggga

SEQ ID NO: 530106 - RNA, 32 nt, Human
uguguguccagagugagcaaggauuauguuuu

SEQ ID NO: 530107 - RNA, 32 nt, Human
uguguguccauggcauccggagcgaggcgacu

SEQ ID NO: 530108 - RNA, 32 nt, Human
uguguguccuucugagugucagaggaacggcc

SEQ ID NO: 530109 - RNA, 32 nt, Human
uguguguccuugcccugccugccuguggcucu

SEQ ID NO: 530110 - RNA, 32 nt, Human
ugugugucgcgcguguccgcacuggaggcaua

SEQ ID NO: 530111 - RNA, 29 nt, Human
ugugugucgguguguguggagagggugcu

SEQ ID NO: 530112 - RNA, 32 nt, Human
ugugugucuccuauucucuccucucucucugu

SEQ ID NO: 530113 - RNA, 32 nt, Human
ugugugucucucucagccccugcccaggcuag

SEQ ID NO: 530114 - RNA, 29 nt, Human
ugugugucugugugugugccuggagcugc

SEQ ID NO: 530115 - RNA, 32 nt, Human
ugugugucuuggugcauuggaaaaggagucag

SEQ ID NO: 530116 - RNA, 32 nt, Human
ugugugucuuucuccccgagcuccccuguucc

SEQ ID NO: 530117 - RNA, 32 nt, Human
ugugugugaacaaaugugacuccauauuuauu

SEQ ID NO: 530118 - RNA, 32 nt, Human
ugugugugaacuguuguuucuuugccacaugu

SEQ ID NO: 530119 - RNA, 32 nt, Human
ugugugugaccccuccuggggccaggccgggc

SEQ ID NO: 530120 - RNA, 32 nt, Human
ugugugugacucugcagcuccuggccagcuga

SEQ ID NO: 530121 - RNA, 32 nt, Human
ugugugugacucuggguggaagugcccagccc

SEQ ID NO: 530122 - RNA, 32 nt, Human
ugugugugagagacacacacaaacacauuuca

SEQ ID NO: 530123 - RNA, 32 nt, Human
ugugugugagagagagcccucccacugccagc

SEQ ID NO: 530124 - RNA, 32 nt, Human
ugugugugagccagagggagcugugguaaggg

SEQ ID NO: 530125 - RNA, 32 nt, Human
ugugugugagugugugcgcguaugugcgcaca

SEQ ID NO: 530126 - RNA, 29 nt, Human
ugugugugagugugugugggagagagugu

SEQ ID NO: 530127 - RNA, 32 nt, Human
ugugugugaugggguuuugcucuuguugccca

SEQ ID NO: 530128 - RNA, 32 nt, Human
ugugugugauguccaccauguccuucuguggu

SEQ ID NO: 530129 - RNA, 22 nt, Human
ugugugugcaaacaugugcucu

SEQ ID NO: 530130 - RNA, 32 nt, Human
ugugugugcauaggagaauggcccacuccaaa

SEQ ID NO: 530131 - RNA, 32 nt, Human
ugugugugcaugcacacgcauguauguaucug

SEQ ID NO: 530132 - RNA, 29 nt, Human
ugugugugcaugugugugcaggggugugu

SEQ ID NO: 530133 - RNA, 32 nt, Human
ugugugugcaugugugugucugucuuuguggg

SEQ ID NO: 530134 - RNA, 29 nt, Human
ugugugugcgugugugugauuuggggugu

SEQ ID NO: 530135 - RNA, 32 nt, Human
uguguguggagagcuuucuaucuuaccaagug

SEQ ID NO: 530136 - RNA, 32 nt, Human
ugugugugggaaguggaagcagcaugaagugc

SEQ ID NO: 530137 - RNA, 32 nt, Human
uguguguggggaaaagugcaguauuuaccugu

SEQ ID NO: 530138 - RNA, 32 nt, Human
uguguguggggaggggaagggugugugagugg

SEQ ID NO: 530139 - RNA, 32 nt, Human
uguguguggggaugugugugugggccuaugca

SEQ ID NO: 530140 - RNA, 32 nt, Human
ugugugugggggugugucuguggccagucauu

SEQ ID NO: 530141 - RNA, 32 nt, Human
uguguguggugggcacacauagaacacuugcu

SEQ ID NO: 530142 - RNA, 32 nt, Human
uguguguguaaccucaugguugugcucaggcu

SEQ ID NO: 530143 - RNA, 32 nt, Human
uguguguguaccacugccaucugaacaaacua

SEQ ID NO: 530144 - RNA, 24 nt, Human
uguguguguauauauacucacaua

SEQ ID NO: 530145 - RNA, 24 nt, Human
uguguguguauauauguguauaua

SEQ ID NO: 530146 - RNA, 25 nt, Human
uguguguguaugaaauacacacaua

SEQ ID NO: 530147 - RNA, 32 nt, Human
uguguguguaugggccugaucacacacaaaca

SEQ ID NO: 530148 - RNA, 32 nt, Human
uguguguguauguauaugugugugggugcaca

SEQ ID NO: 530149 - RNA, 32 nt, Human
uguguguguauguguggguguguguuacauac

SEQ ID NO: 530150 - RNA, 29 nt, Human
uguguguguauguguguggguuagggcuu

SEQ ID NO: 530151 - RNA, 29 nt, Human
uguguguguauguguguguuaugggggaa

SEQ ID NO: 530152 - RNA, 32 nt, Human
ugugugugucaggguuggagagcuuugguagg

SEQ ID NO: 530153 - RNA, 32 nt, Human
ugugugugucuaauuugauuuaccucaggugu

SEQ ID NO: 530154 - RNA, 32 nt, Human
ugugugugucucacacacacagcgcgcagugu

SEQ ID NO: 530155 - RNA, 32 nt, Human
ugugugugucugcaccacauacauggacacug

SEQ ID NO: 530156 - RNA, 32 nt, Human
ugugugugucugcauguguguuuguacauaga

SEQ ID NO: 530157 - RNA, 29 nt, Human
ugugugugucugucuggggugauauguuu

SEQ ID NO: 530158 - RNA, 29 nt, Human
ugugugugucuguguaugcaaguguuggu

SEQ ID NO: 530159 - RNA, 29 nt, Human
ugugugugucugugugugucuugggaggg

SEQ ID NO: 530160 - RNA, 29 nt, Human
ugugugugucugugugugugccuggagcu

SEQ ID NO: 530161 - RNA, 32 nt, Human
ugugugugucuuuucuccccaguaauuccuua

SEQ ID NO: 530162 - RNA, 32 nt, Human
ugugugugugaaauuuuaguucugguuuguuu

SEQ ID NO: 530163 - RNA, 32 nt, Human
ugugugugugacugugugugcagagaugugug

SEQ ID NO: 530164 - RNA, 32 nt, Human
ugugugugugagagacacacacaaacacauuu

SEQ ID NO: 530165 - RNA, 32 nt, Human
ugugugugugagugugugugggagagagugug

SEQ ID NO: 530166 - RNA, 18 nt, Human
ugugugugugcacacaca

SEQ ID NO: 530167 - RNA, 21 nt, Human
ugugugugugcacacacacag

SEQ ID NO: 530168 - RNA, 18 nt, Human
ugugugugugcgcacaca

SEQ ID NO: 530169 - RNA, 32 nt, Human
ugugugugugcgugugcacgugcacacaugug

SEQ ID NO: 530170 - RNA, 32 nt, Human
uguguguguggguggucacaggagagugugag

SEQ ID NO: 530171 - RNA, 32 nt, Human
uguguguguggguggucacaggagggugugag

SEQ ID NO: 530172 - RNA, 32 nt, Human
ugugugugugggugugcacgugcacacaugug

SEQ ID NO: 530173 - RNA, 32 nt, Human
uguguguguugaccaucacugccaucacauca

SEQ ID NO: 530174 - RNA, 32 nt, Human
uguguguguuuccuuauugucauuccauuaua

SEQ ID NO: 530175 - RNA, 32 nt, Human
uguguguguuugaaugaaaaaugcuuauguau

SEQ ID NO: 530176 - RNA, 32 nt, Human
uguguguguuugcucuucgcagccucuugagc

SEQ ID NO: 530177 - RNA, 29 nt, Human
uguguguguuuguguguguauaccugaca

SEQ ID NO: 530178 - RNA, 32 nt, Human
uguguguucagggacugagccuggggacgccc

SEQ ID NO: 530179 - RNA, 32 nt, Human
uguguguucaucuacccaugaggaauaaaacc

SEQ ID NO: 530180 - RNA, 32 nt, Human
uguguguucuuccguuucuuccuugucgcucu

SEQ ID NO: 530181 - RNA, 32 nt, Human
uguguguugcaugagcaugcaugcgugcgagu

SEQ ID NO: 530182 - RNA, 32 nt, Human
uguguguuucaggcuuggaguguaugaguggu

SEQ ID NO: 530183 - RNA, 32 nt, Human
uguguguuucuguauaugcacacacauaaacg

SEQ ID NO: 530184 - RNA, 32 nt, Human
uguguguuugggcccggauggucagggugggg

SEQ ID NO: 530185 - RNA, 32 nt, Human
uguguguuuguggggagagggaaggaggaagu

SEQ ID NO: 530186 - RNA, 32 nt, Human
uguguguuuuaacagcaugacuucuuacagag

SEQ ID NO: 530187 - RNA, 32 nt, Human
uguguguuuuaaggucuugcucugucacuugg

SEQ ID NO: 530188 - RNA, 32 nt, Human
uguguuaaaaagaaauuugcaacugugaauaa

SEQ ID NO: 530189 - RNA, 32 nt, Human
uguguuaaaauuacaaugaucuuuuaaaaaga

SEQ ID NO: 530190 - RNA, 32 nt, Human
uguguuaaacuguuuagugcucuguuuuuaag

SEQ ID NO: 530191 - RNA, 32 nt, Human
uguguuaacucaggaugccaaguggcccucag

SEQ ID NO: 530192 - RNA, 32 nt, Human
uguguuaacugcuggaagggacagaugcacug

SEQ ID NO: 530193 - RNA, 22 nt, Human
uguguuaagcaagaacuacaga

SEQ ID NO: 530194 - RNA, 32 nt, Human
uguguuaaucuuugcaucauauuggacucuug

SEQ ID NO: 530195 - RNA, 32 nt, Human
uguguuacaugguaauaaagccaaugaagaga

SEQ ID NO: 530196 - RNA, 32 nt, Human
uguguuacccaggaugcagcaggugugugcag

SEQ ID NO: 530197 - RNA, 32 nt, Human
uguguuacuaguggccccaguauaccugggau

SEQ ID NO: 530198 - RNA, 32 nt, Human
uguguuacuccuaaggacuuuugggauuuuga

SEQ ID NO: 530199 - RNA, 32 nt, Human
uguguuacugaccaauguggagcugggucuag

SEQ ID NO: 530200 - RNA, 32 nt, Human
uguguuacugugggaaccuuuccucuuaaugc

SEQ ID NO: 530201 - RNA, 32 nt, Human
uguguuagaaaugcaguugccauaggaguaac

SEQ ID NO: 530202 - RNA, 32 nt, Human
uguguuagaugacgugccaccuccucaggaaa

SEQ ID NO: 530203 - RNA, 32 nt, Human
uguguuaggugcugggaguacagugaaaggca

SEQ ID NO: 530204 - RNA, 32 nt, Human
uguguuaguccacaccuguggucccagcugcc

SEQ ID NO: 530205 - RNA, 32 nt, Human
uguguuagucucaggcccuccuggaccacguu

SEQ ID NO: 530206 - RNA, 32 nt, Human
uguguuagucuuccugcagcugagcuuccaca

SEQ ID NO: 530207 - RNA, 32 nt, Human
uguguuauaaguaacacagaagaagaauggau

SEQ ID NO: 530208 - RNA, 32 nt, Human
uguguuauacaguuuaaaaagccugcaaaagu

SEQ ID NO: 530209 - RNA, 20 nt, Human
uguguuauauaaacauaaua

SEQ ID NO: 530210 - RNA, 32 nt, Human
uguguucaaaggcuugauggcagaugggagcc

SEQ ID NO: 530211 - RNA, 32 nt, Human
uguguucaacauguguuacaagcauggguucu

SEQ ID NO: 530212 - RNA, 32 nt, Human
uguguucaagcagaucugauguccucgccugu

SEQ ID NO: 530213 - RNA, 32 nt, Human
uguguucaauuauuaccaucacagccuuuuaa

SEQ ID NO: 530214 - RNA, 32 nt, Human
uguguucacaauggauaggcacaggaaaccag

SEQ ID NO: 530215 - RNA, 32 nt, Human
uguguucacaccacugcacuccagucugggca

SEQ ID NO: 530216 - RNA, 32 nt, Human
uguguucacaucuucgcucuggccagcccauu

SEQ ID NO: 530217 - RNA, 32 nt, Human
uguguucacaugugccuuccguccagagcagu

SEQ ID NO: 530218 - RNA, 32 nt, Human
uguguucaccugcucguccuggcuugggcccc

SEQ ID NO: 530219 - RNA, 32 nt, Human
uguguucagcugugggcaauauaaugggugga

SEQ ID NO: 530220 - RNA, 32 nt, Human
uguguucaggcuccugagcacggcuucccuuu

SEQ ID NO: 530221 - RNA, 32 nt, Human
uguguucaggggucuugccuccaggaugaaaa

SEQ ID NO: 530222 - RNA, 32 nt, Human
uguguucaguuagagucguggaaaaaucccug

SEQ ID NO: 530223 - RNA, 32 nt, Human
uguguucaguugaauuguaacugcuuuuugua

SEQ ID NO: 530224 - RNA, 32 nt, Human
uguguucauauauggacauggaaauauuuaua

SEQ ID NO: 530225 - RNA, 32 nt, Human
uguguucaucaaauacuccuuucagagcuguu

SEQ ID NO: 530226 - RNA, 32 nt, Human
uguguucaugccacugcacuuccagccugggu

SEQ ID NO: 530227 - RNA, 19 nt, Human
uguguucauuaucccuaca

SEQ ID NO: 530228 - RNA, 32 nt, Human
uguguuccaggagugguggcucugagguguga

SEQ ID NO: 530229 - RNA, 32 nt, Human
uguguuccaggaugagacaucuggaggugagc

SEQ ID NO: 530230 - RNA, 32 nt, Human
uguguuccaguaaaaccacaaaaacaggcagc

SEQ ID NO: 530231 - RNA, 32 nt, Human
uguguucccacagacagaaacgccugccccug

SEQ ID NO: 530232 - RNA, 32 nt, Human
uguguucccggcugugugauccugggcaagaa

SEQ ID NO: 530233 - RNA, 32 nt, Human
uguguucccgugucugucugucuugcaucccu

SEQ ID NO: 530234 - RNA, 18 nt, Human
uguguuccuacugggcuu

SEQ ID NO: 530235 - RNA, 32 nt, Human
uguguuccugaagcguccagcacuccggcgag

SEQ ID NO: 530236 - RNA, 32 nt, Human
uguguuccugcagcgucugguguuguccccag

SEQ ID NO: 530237 - RNA, 32 nt, Human
uguguuccugcucuggcccccguggggcuggg

SEQ ID NO: 530238 - RNA, 32 nt, Human
uguguuccuguauuguggccuggugccauuuu

SEQ ID NO: 530239 - RNA, 32 nt, Human
uguguucgcaccacugcacuccagccugggug

SEQ ID NO: 530240 - RNA, 32 nt, Human
uguguucgguccuucaggcucuccuuuaaaag

SEQ ID NO: 530241 - RNA, 32 nt, Human
uguguucucaaaggcaaauccuaucacccacu

SEQ ID NO: 530242 - RNA, 32 nt, Human
uguguucugagcaaccuuuccccgaacacaca

SEQ ID NO: 530243 - RNA, 32 nt, Human
uguguucugaguggaaguacagccuggaaagu

SEQ ID NO: 530244 - RNA, 32 nt, Human
uguguucugcuaugguccacaggcuggagggu

SEQ ID NO: 530245 - RNA, 32 nt, Human
uguguucugcuccauaccuuuucucuuuucuu

SEQ ID NO: 530246 - RNA, 32 nt, Human
uguguucugcuccauacuuuuucucuuuucuu

SEQ ID NO: 530247 - RNA, 32 nt, Human
uguguucuggaauuuucugccucacagcaaau

SEQ ID NO: 530248 - RNA, 32 nt, Human
uguguucugggcaccaccgugacccugcccag

SEQ ID NO: 530249 - RNA, 32 nt, Human
uguguucugguaaucgugcagaacagcaugug

SEQ ID NO: 530250 - RNA, 32 nt, Human
uguguucuguuaauguaagacgaugaacaguu

SEQ ID NO: 530251 - RNA, 20 nt, Human
uguguucuuauuaaacaaug

SEQ ID NO: 530252 - RNA, 32 nt, Human
uguguucuucaaaaugauguugaagucccagu

SEQ ID NO: 530253 - RNA, 32 nt, Human
uguguucuucauugaugcuguacuccugaaaa

SEQ ID NO: 530254 - RNA, 32 nt, Human
uguguucuucuuucucuguauuccgauacaaa

SEQ ID NO: 530255 - RNA, 32 nt, Human
uguguucuuggaguauuucacacugaggacua

SEQ ID NO: 530256 - RNA, 32 nt, Human
uguguucuuguaggaagaucuguugaaauucc

SEQ ID NO: 530257 - RNA, 32 nt, Human
uguguugaagauggcaaagccacaagauggaa

SEQ ID NO: 530258 - RNA, 32 nt, Human
uguguugagagauacuuagagggagggaguag

SEQ ID NO: 530259 - RNA, 32 nt, Human
uguguugagcacaaggggaagaaugaacacag

SEQ ID NO: 530260 - RNA, 32 nt, Human
uguguugagucaaggcaggaugacaguucagc

SEQ ID NO: 530261 - RNA, 32 nt, Human
uguguugcaaggagcccuccugccugggagcu

SEQ ID NO: 530262 - RNA, 32 nt, Human
uguguugcagggaagcaaucagaggaaaucuc

SEQ ID NO: 530263 - RNA, 32 nt, Human
uguguugcaggguggagaaguggggagaagug

SEQ ID NO: 530264 - RNA, 32 nt, Human
uguguugccacuuuccaagucacugcaaaacc

SEQ ID NO: 530265 - RNA, 32 nt, Human
uguguugccaggcaggcaccugggcuuucugg

SEQ ID NO: 530266 - RNA, 32 nt, Human
uguguugcccaggcuggagugcaguggccugg

SEQ ID NO: 530267 - RNA, 32 nt, Human
uguguugcccaggcuggagugcagugguguga

SEQ ID NO: 530268 - RNA, 32 nt, Human
uguguugcccaggcuggagugcgguggcuauu

SEQ ID NO: 530269 - RNA, 32 nt, Human
uguguugcccccacccuggcugccugcuaagg

SEQ ID NO: 530270 - RNA, 32 nt, Human
uguguugccuccucccugucugacucuuccuc

SEQ ID NO: 530271 - RNA, 32 nt, Human
uguguugccugggauuccuuucccuccacccu

SEQ ID NO: 530272 - RNA, 32 nt, Human
uguguugcucacugcagugggcccagccuggu

SEQ ID NO: 530273 - RNA, 32 nt, Human
uguguugcucaggcuggagugcagugguguga

SEQ ID NO: 530274 - RNA, 32 nt, Human
uguguuggaacaccaagguugcaugagcugau

SEQ ID NO: 530275 - RNA, 32 nt, Human
uguguuggacccauccuugccccgcugugccu

SEQ ID NO: 530276 - RNA, 32 nt, Human
uguguuggagccacacgguuggacagguuccc

SEQ ID NO: 530277 - RNA, 32 nt, Human
uguguuggcacacgccuguaauaccagcuacu

SEQ ID NO: 530278 - RNA, 32 nt, Human
uguguuggcacgugccuguaaucccaguuacu

SEQ ID NO: 530279 - RNA, 32 nt, Human
uguguugggagaaacuuugugaaugcaccauu

SEQ ID NO: 530280 - RNA, 32 nt, Human
uguguugggagcagaggaguccuacuccuugc

SEQ ID NO: 530281 - RNA, 32 nt, Human
uguguugggaguauguauucacacacauacau

SEQ ID NO: 530282 - RNA, 32 nt, Human
uguguugggauuacaggcgugaaccaccgcgc

SEQ ID NO: 530283 - RNA, 32 nt, Human
uguguuggugcaugcuuauaaucccagcuacu

SEQ ID NO: 530284 - RNA, 32 nt, Human
uguguuggugcuuuagcgauugauugauguac

SEQ ID NO: 530285 - RNA, 32 nt, Human
uguguugguggcacauuggauauuucuaacau

SEQ ID NO: 530286 - RNA, 32 nt, Human
uguguuggugggcaccuguaaucccaccuacu

SEQ ID NO: 530287 - RNA, 32 nt, Human
uguguuggugggccccuguaaucccagcuacu

SEQ ID NO: 530288 - RNA, 32 nt, Human
uguguuggugggguaaggcaucaggaaaaaug

SEQ ID NO: 530289 - RNA, 32 nt, Human
uguguuggugugcaccuguaaucccagcuacu

SEQ ID NO: 530290 - RNA, 32 nt, Human
uguguuguaccacugcacuccagccuggguga

SEQ ID NO: 530291 - RNA, 32 nt, Human
uguguuguccaggcuggagugcagugguguga

SEQ ID NO: 530292 - RNA, 32 nt, Human
uguguugucugcuacccucauccuggucacug

SEQ ID NO: 530293 - RNA, 32 nt, Human
uguguugugacuccugaggucucucagcucuc

SEQ ID NO: 530294 - RNA, 32 nt, Human
uguguugugggaggggaugggaggcgccccuc

SEQ ID NO: 530295 - RNA, 32 nt, Human
uguguuguguuaauucuuucucauguugggag

SEQ ID NO: 530296 - RNA, 32 nt, Human
uguguuguuauccagggcuccagacuuccucc

SEQ ID NO: 530297 - RNA, 32 nt, Human
uguguuguuuaaaaugcggcugcucugcuucc

SEQ ID NO: 530298 - RNA, 32 nt, Human
uguguuguuucuuggaaaguuuuguaaaauua

SEQ ID NO: 530299 - RNA, 32 nt, Human
uguguuuaagaaaaggaggacugaaggacaaa

SEQ ID NO: 530300 - RNA, 32 nt, Human
uguguuuaagaugcagauuacaggugugagcc

SEQ ID NO: 530301 - RNA, 32 nt, Human
uguguuuacauacacucgugcuuuuccuuauc

SEQ ID NO: 530302 - RNA, 32 nt, Human
uguguuuacuguguccuugcucuccuuccuug

SEQ ID NO: 530303 - RNA, 32 nt, Human
uguguuucaaaaccaugccugguauuuucaac

SEQ ID NO: 530304 - RNA, 32 nt, Human
uguguuucaaagcugcucaaucaaaagaaagg

SEQ ID NO: 530305 - RNA, 32 nt, Human
uguguuucaaauuaugcauuccaggcucuagu

SEQ ID NO: 530306 - RNA, 32 nt, Human
uguguuucagcccaaagcagcaaauggaaucc

SEQ ID NO: 530307 - RNA, 32 nt, Human
uguguuucagcccuggaauugccacauucucc

SEQ ID NO: 530308 - RNA, 32 nt, Human
uguguuucagugacugauaaacaaaaaugaag

SEQ ID NO: 530309 - RNA, 32 nt, Human
uguguuucauaaugacuuuuaacugguaaaaa

SEQ ID NO: 530310 - RNA, 32 nt, Human
uguguuucauguuucaccuaagucauaaauaa

SEQ ID NO: 530311 - RNA, 32 nt, Human
uguguuucauucugaucuuucauucauauaua

SEQ ID NO: 530312 - RNA, 32 nt, Human
uguguuucauucugucucaaaaaucacauuuu

SEQ ID NO: 530313 - RNA, 32 nt, Human
uguguuuccagcccugugcugggccuguagag

SEQ ID NO: 530314 - RNA, 32 nt, Human
uguguuuccagggggugcugggggaaggguuc

SEQ ID NO: 530315 - RNA, 32 nt, Human
uguguuuccaucucaaagaaggcauuugcagg

SEQ ID NO: 530316 - RNA, 32 nt, Human
uguguuuccauucuaagauugagucuggcagu

SEQ ID NO: 530317 - RNA, 32 nt, Human
uguguuucccagccucuccacucccccgccag

SEQ ID NO: 530318 - RNA, 32 nt, Human
uguguuucgccacugcacaccagccuggguga

SEQ ID NO: 530319 - RNA, 32 nt, Human
uguguuucuagagugagauuuguguuuucugc

SEQ ID NO: 530320 - RNA, 32 nt, Human
uguguuucucacuggaggcuggaaugaaugau

SEQ ID NO: 530321 - RNA, 32 nt, Human
uguguuucuuaaucuucccuucugccuuguuc

SEQ ID NO: 530322 - RNA, 21 nt, Human
uguguuugacagagaugggga

SEQ ID NO: 530323 - RNA, 32 nt, Human
uguguuugaggcaccagguuugagugcuggga

SEQ ID NO: 530324 - RNA, 32 nt, Human
uguguuugcaaauaggcuccauuuuccauguu

SEQ ID NO: 530325 - RNA, 32 nt, Human
uguguuugcaucacugcacuccagccugggca

SEQ ID NO: 530326 - RNA, 32 nt, Human
uguguuugcauuccacugcucugcucccuaag

SEQ ID NO: 530327 - RNA, 32 nt, Human
uguguuugccuaaccuucauugcagugggcag

SEQ ID NO: 530328 - RNA, 32 nt, Human
uguguuugccuaggagagugugugugggcagc

SEQ ID NO: 530329 - RNA, 32 nt, Human
uguguuugcuacacugaccucuugcggucuug

SEQ ID NO: 530330 - RNA, 32 nt, Human
uguguuuggaagcaagggacuccgaguuguga

SEQ ID NO: 530331 - RNA, 32 nt, Human
uguguuuggaagcuucagcccugcacauuuga

SEQ ID NO: 530332 - RNA, 32 nt, Human
uguguuuggcaauauuacugugccaaaaauca

SEQ ID NO: 530333 - RNA, 32 nt, Human
uguguuugggaagugggugaggcugggcaggg

SEQ ID NO: 530334 - RNA, 32 nt, Human
uguguuuggucugcccuggaggugcugggccc

SEQ ID NO: 530335 - RNA, 32 nt, Human
uguguuuguguaugucuguguauguaaguuug

SEQ ID NO: 530336 - RNA, 32 nt, Human
uguguuuguguaugugucuguguguguauuca

SEQ ID NO: 530337 - RNA, 32 nt, Human
uguguuuguguguguauaccugacauauauag

SEQ ID NO: 530338 - RNA, 32 nt, Human
uguguuuguuaacaacccuuuaucucuuagug

SEQ ID NO: 530339 - RNA, 29 nt, Human
uguguuuguuugugugugucugugugugc

SEQ ID NO: 530340 - RNA, 32 nt, Human
uguguuuuaagugcccagugaacacaguucca

SEQ ID NO: 530341 - RNA, 32 nt, Human
uguguuuuacccagcaccuccggacacucacc

SEQ ID NO: 530342 - RNA, 32 nt, Human
uguguuuuagugaaucugcucucccagcucac

SEQ ID NO: 530343 - RNA, 32 nt, Human
uguguuuuagugggaacaccaaaguuugccua

SEQ ID NO: 530344 - RNA, 32 nt, Human
uguguuuucaaauguguauagaugcuauuguu

SEQ ID NO: 530345 - RNA, 32 nt, Human
uguguuuucaagcccucuacuucucuuuccag

SEQ ID NO: 530346 - RNA, 22 nt, Human
uguguuuucucgaauuuugcca

SEQ ID NO: 530347 - RNA, 32 nt, Human
uguguuuucugcccuuuuccucuccagccaau

SEQ ID NO: 530348 - RNA, 32 nt, Human
uguguuuucuucugugugaaguacgugagcuu

SEQ ID NO: 530349 - RNA, 32 nt, Human
uguguuuucuuuucuuuuguuuuuggcugucu

SEQ ID NO: 530350 - RNA, 32 nt, Human
uguguuuugcucugucuaaaaacaucugcaua

SEQ ID NO: 530351 - RNA, 32 nt, Human
uguguuuugggauguguccuagcauuuacaag

SEQ ID NO: 530352 - RNA, 19 nt, Human
uguguuuuguuuugauuug

SEQ ID NO: 530353 - RNA, 32 nt, Human
uguguuuuuaaagaaguauaagggaaaaggaa

SEQ ID NO: 530354 - RNA, 32 nt, Human
uguguuuuuccucugcuguguucugugugucc

SEQ ID NO: 530355 - RNA, 32 nt, Human
uguguuuuucugcuuuguucgcucuuacuucu

SEQ ID NO: 530356 - RNA, 32 nt, Human
uguguuuuugagacagggucgcacucugucgc

SEQ ID NO: 530357 - RNA, 32 nt, Human
uguguuuuugagacggagucucgcucugucgg

SEQ ID NO: 530358 - RNA, 32 nt, Human
uguguuuuugagacggggucgcacucugucgc

SEQ ID NO: 530359 - RNA, 32 nt, Human
uguguuuuugcagugccaauuugcauuuucug

SEQ ID NO: 530360 - RNA, 32 nt, Human
uguuaaaaagaaauuugcaacugugaauaaaa

SEQ ID NO: 530361 - RNA, 32 nt, Human
uguuaaaaaggcugcacugacaugguuaaauu

SEQ ID NO: 530362 - RNA, 32 nt, Human
uguuaaaaaugugaauuucuugaaugaauuuc

SEQ ID NO: 530363 - RNA, 32 nt, Human
uguuaaaaccagcuguccuguucuccaucucc

SEQ ID NO: 530364 - RNA, 32 nt, Human
uguuaaaaucucaagaaaauuucacagagcua

SEQ ID NO: 530365 - RNA, 32 nt, Human
uguuaaaauuagagguaguaaaaugacacauu

SEQ ID NO: 530366 - RNA, 32 nt, Human
uguuaaacaaaugcuugaaggcagcaugcuug

SEQ ID NO: 530367 - RNA, 32 nt, Human
uguuaaacagaugcuugaaggcagcaugcucc

SEQ ID NO: 530368 - RNA, 32 nt, Human
uguuaaacagaugcuugaaggcagcaugcucg

SEQ ID NO: 530369 - RNA, 22 nt, Human
uguuaaacagucuccggugccc

SEQ ID NO: 530370 - RNA, 32 nt, Human
uguuaaacauuuugaguuaucuucccagguug

SEQ ID NO: 530371 - RNA, 32 nt, Human
uguuaaagauuuuucaaugacacuuguucaag

SEQ ID NO: 530372 - RNA, 32 nt, Human
uguuaaagccaaaacccagcucugagggccuu

SEQ ID NO: 530373 - RNA, 32 nt, Human
uguuaaagcuaaauuuauuuugcuucccucca

SEQ ID NO: 530374 - RNA, 32 nt, Human
uguuaaaggaugaugcuuugccuauguaauag

SEQ ID NO: 530375 - RNA, 32 nt, Human
uguuaaagguguuuuguuuucuuaauugauac

SEQ ID NO: 530376 - RNA, 32 nt, Human
uguuaaagucaaaggcugcaguaugucuauau

SEQ ID NO: 530377 - RNA, 32 nt, Human
uguuaaaguccauugggccucccaggccccuc

SEQ ID NO: 530378 - RNA, 32 nt, Human
uguuaaauagaaacugaauguacuggguugaa

SEQ ID NO: 530379 - RNA, 32 nt, Human
uguuaaaucagaaaugugaauguaguaagggg

SEQ ID NO: 530380 - RNA, 32 nt, Human
uguuaaauccaguauggccacaggaggagguc

SEQ ID NO: 530381 - RNA, 32 nt, Human
uguuaaaugccauuaggcaccaacuuaaagag

SEQ ID NO: 530382 - RNA, 32 nt, Human
uguuaacacaaaagggcaucaccaucccacga

SEQ ID NO: 530383 - RNA, 32 nt, Human
uguuaacacagcuguggcucguuugagggauu

SEQ ID NO: 530384 - RNA, 32 nt, Human
uguuaacagaugucagagugauucucaccaaa

SEQ ID NO: 530385 - RNA, 32 nt, Human
uguuaacaugugcuuagucuucccucuuucuc

SEQ ID NO: 530386 - RNA, 32 nt, Human
uguuaacauugagacucuggccccagauuggu

SEQ ID NO: 530387 - RNA, 32 nt, Human
uguuaacauuuuucuuucugcagagaggaaga

SEQ ID NO: 530388 - RNA, 32 nt, Human
uguuaaccagaggcugcucuucccaggcugcu

SEQ ID NO: 530389 - RNA, 32 nt, Human
uguuaaccaugguggggacagccuucuucaug

SEQ ID NO: 530390 - RNA, 32 nt, Human
uguuaacgacaggcucuguuguauguguuacu

SEQ ID NO: 530391 - RNA, 32 nt, Human
uguuaacuaagcauugugcuucccaggugguc

SEQ ID NO: 530392 - RNA, 32 nt, Human
uguuaacucauuuuauccauuccuuacauaau

SEQ ID NO: 530393 - RNA, 32 nt, Human
uguuaacucuugccguaucaggagacugaaag

SEQ ID NO: 530394 - RNA, 32 nt, Human
uguuaacucuuucugcuccuugcauuuugaca

SEQ ID NO: 530395 - RNA, 32 nt, Human
uguuaacugagugccuuuugguggagaggccc

SEQ ID NO: 530396 - RNA, 32 nt, Human
uguuaacuggccugcauggggucacacaguga

SEQ ID NO: 530397 - RNA, 32 nt, Human
uguuaacuuuuaagcauuucacaaacaacauu

SEQ ID NO: 530398 - RNA, 32 nt, Human
uguuaagaaugacauucagugcagccucuuua

SEQ ID NO: 530399 - RNA, 32 nt, Human
uguuaagagccaguucuuagaagaaccuaugc

SEQ ID NO: 530400 - RNA, 32 nt, Human
uguuaagaugaauuaucuccuaaaaauaucau

SEQ ID NO: 530401 - RNA, 32 nt, Human
uguuaagcaaacauccauaguaaaacaaauaa

SEQ ID NO: 530402 - RNA, 32 nt, Human
uguuaagcacacauacuuuagaugugugcucc

SEQ ID NO: 530403 - RNA, 32 nt, Human
uguuaagcagaagggagagaguccuuacuccc

SEQ ID NO: 530404 - RNA, 32 nt, Human
uguuaagccuuggcucuggauguggccuagau

SEQ ID NO: 530405 - RNA, 32 nt, Human
uguuaagcuacugcuguuuucuuucuguuauu

SEQ ID NO: 530406 - RNA, 32 nt, Human
uguuaaggaaauucaucucuuguuuuaucaga

SEQ ID NO: 530407 - RNA, 32 nt, Human
uguuaaggaaauucaucucuuguuuuaucagg

SEQ ID NO: 530408 - RNA, 32 nt, Human
uguuaaggauuuucacucucuuucacugggcu

SEQ ID NO: 530409 - RNA, 32 nt, Human
uguuaaggggagacuaggcucccuggacuagg

SEQ ID NO: 530410 - RNA, 32 nt, Human
uguuaaggguaagcuuguaauaccucaccagu

SEQ ID NO: 530411 - RNA, 32 nt, Human
uguuaaggguguugucucugucaccucuucaa

SEQ ID NO: 530412 - RNA, 32 nt, Human
uguuaagguuccaaacugugcuacagauacuu

SEQ ID NO: 530413 - RNA, 32 nt, Human
uguuaagugcaacaacaucacaguagagcuac

SEQ ID NO: 530414 - RNA, 31 nt, Human
uguuaauaaaugggcuuaauguuaacaugga

SEQ ID NO: 530415 - RNA, 32 nt, Human
uguuaauacaauacguuucuacuuucccugau

SEQ ID NO: 530416 - RNA, 32 nt, Human
uguuaauauuugaauugccuugcuuuuaucac

SEQ ID NO: 530417 - RNA, 32 nt, Human
uguuaaucuaaucaaguuugcuguuaguugug

SEQ ID NO: 530418 - RNA, 32 nt, Human
uguuaaucucagagacaguauuucaagagagu

SEQ ID NO: 530419 - RNA, 32 nt, Human
uguuaaugaaagugccugaaagaccuuccuua

SEQ ID NO: 530420 - RNA, 32 nt, Human
uguuaaugaacaagucuucuucugguaagagc

SEQ ID NO: 530421 - RNA, 32 nt, Human
uguuaaugagaugguauuguaaaagaguugca

SEQ ID NO: 530422 - RNA, 32 nt, Human
uguuaaugaugcuccugccucugccucccagc

SEQ ID NO: 530423 - RNA, 32 nt, Human
uguuaaugccaucaauccucuaggaaggaauu

SEQ ID NO: 530424 - RNA, 31 nt, Human
uguuaaugcgggcagcaccuacagcaacuug

SEQ ID NO: 530425 - RNA, 32 nt, Human
uguuaaugcuacuggucuaacuucauucagua

SEQ ID NO: 530426 - RNA, 32 nt, Human
uguuaaugcuuuguuaaugcuuuucccacucu

SEQ ID NO: 530427 - RNA, 30 nt, Human
uguuaauggaaagaggaaagaagaaaagaa

SEQ ID NO: 530428 - RNA, 32 nt, Human
uguuaauggaagcaaggcaccuguugaaggaa

SEQ ID NO: 530429 - RNA, 32 nt, Human
uguuaauguguagaguucuccuuucucgaaau

SEQ ID NO: 530430 - RNA, 32 nt, Human
uguuaauuguucaaacuuucugccuucuacau

SEQ ID NO: 530431 - RNA, 32 nt, Human
uguuaauuugcucaaaauacaauguuugauuu

SEQ ID NO: 530432 - RNA, 32 nt, Human
uguuaauuuguggaguaggggaaagguucugc

SEQ ID NO: 530433 - RNA, 32 nt, Human
uguuacaaaaggcaugagaaugaauguugucg

SEQ ID NO: 530434 - RNA, 32 nt, Human
uguuacaaaauguaacuguuaccauuggaaau

SEQ ID NO: 530435 - RNA, 32 nt, Human
uguuacacacuauuuuggaauuagagaacaua

SEQ ID NO: 530436 - RNA, 32 nt, Human
uguuacacuagaaaauuauuucagucuucaaa

SEQ ID NO: 530437 - RNA, 32 nt, Human
uguuacagaaacagagggcuguuucuuuuugu

SEQ ID NO: 530438 - RNA, 32 nt, Human
uguuacagacgggguuucaccauguuggcugg

SEQ ID NO: 530439 - RNA, 24 nt, Human
uguuacagacucuguuuucugccu

SEQ ID NO: 530440 - RNA, 32 nt, Human
uguuacagaggacccuuacgugagaaauagcu

SEQ ID NO: 530441 - RNA, 32 nt, Human
uguuacagaguuucagaucggucacugauagu

SEQ ID NO: 530442 - RNA, 32 nt, Human
uguuacagauggugaaccgaaacuuacagagc

SEQ ID NO: 530443 - RNA, 32 nt, Human
uguuacagcccauaacagcugcagccuugacu

SEQ ID NO: 530444 - RNA, 32 nt, Human
uguuacaggagaagagucaccuggaaaauaag

SEQ ID NO: 530445 - RNA, 32 nt, Human
uguuacagggagcauggucuguugaagauuuu

SEQ ID NO: 530446 - RNA, 32 nt, Human
uguuacaggggugcuggccuucccuggcgccu

SEQ ID NO: 530447 - RNA, 32 nt, Human
uguuacagggugaccuguucucuagcugugau

SEQ ID NO: 530448 - RNA, 32 nt, Human
uguuacagugagaccuguguucgguggaagcc

SEQ ID NO: 530449 - RNA, 32 nt, Human
uguuacaguucugcaaagguaaccuggaguuu

SEQ ID NO: 530450 - RNA, 20 nt, Human
uguuacaugaacaugugcau

SEQ ID NO: 530451 - RNA, 32 nt, Human
uguuacaugagagacaucaaucagguucucuu

SEQ ID NO: 530452 - RNA, 32 nt, Human
uguuacauguacagaacuuugucuacagcaca

SEQ ID NO: 530453 - RNA, 32 nt, Human
uguuacauuuuccugcaacucugccuucuuga

SEQ ID NO: 530454 - RNA, 32 nt, Human
uguuaccaaauggugucaguauggaccaauug

SEQ ID NO: 530455 - RNA, 32 nt, Human
uguuaccaacaacagcagacuucuacauguac

SEQ ID NO: 530456 - RNA, 32 nt, Human
uguuaccaaugccucagcaaccacugaaaguu

SEQ ID NO: 530457 - RNA, 32 nt, Human
uguuaccacuuccugaaucaguuauuauuucu

SEQ ID NO: 530458 - RNA, 32 nt, Human
uguuaccaguaggaggaggaugagccacagaa

SEQ ID NO: 530459 - RNA, 32 nt, Human
uguuaccauauuuuguauucuggaccacuuac

SEQ ID NO: 530460 - RNA, 32 nt, Human
uguuaccauugccuuuuucuguugagaaauug

SEQ ID NO: 530461 - RNA, 32 nt, Human
uguuacccaagugucuuauacaagcuucuggu

SEQ ID NO: 530462 - RNA, 24 nt, Human
uguuacccagauuggagugcagug

SEQ ID NO: 530463 - RNA, 24 nt, Human
uguuacccagccuggagugcagug

SEQ ID NO: 530464 - RNA, 23 nt, Human
uguuacccaggccggagugcagu

SEQ ID NO: 530465 - RNA, 24 nt, Human
uguuacccaggccggagugcagug

SEQ ID NO: 530466 - RNA, 24 nt, Human
uguuacccaggcuagaguguagug

SEQ ID NO: 530467 - RNA, 24 nt, Human
uguuacccaggcuccagugcagug

SEQ ID NO: 530468 - RNA, 24 nt, Human
uguuacccaggcuggaauacagug

SEQ ID NO: 530469 - RNA, 23 nt, Human
uguuacccaggcuggaaugcagu

SEQ ID NO: 530470 - RNA, 24 nt, Human
uguuacccaggcuggaaugcagug

SEQ ID NO: 530471 - RNA, 24 nt, Human
uguuacccaggcuggaggacagug

SEQ ID NO: 530472 - RNA, 23 nt, Human
uguuacccaggcuggaguacagu

SEQ ID NO: 530473 - RNA, 24 nt, Human
uguuacccaggcuggaguacagug

SEQ ID NO: 530474 - RNA, 23 nt, Human
uguuacccaggcuggagugcaau

SEQ ID NO: 530475 - RNA, 24 nt, Human
uguuacccaggcuggagugcaaug

SEQ ID NO: 530476 - RNA, 23 nt, Human
uguuacccaggcuggagugcagu

SEQ ID NO: 530477 - RNA, 24 nt, Human
uguuacccaggcuggagugcagug

SEQ ID NO: 530478 - RNA, 32 nt, Human
uguuacccaggcuggucucacacuccuggccu

SEQ ID NO: 530479 - RNA, 21 nt, Human
uguuacccaggguggauugca

SEQ ID NO: 530480 - RNA, 24 nt, Human
uguuacccaugcuggaguacggug

SEQ ID NO: 530481 - RNA, 32 nt, Human
uguuacccaugguguucuuuguuccuuuucau

SEQ ID NO: 530482 - RNA, 32 nt, Human
uguuaccccacccagcccacguguccaaauac

SEQ ID NO: 530483 - RNA, 32 nt, Human
uguuaccccauccucccucccccagccaccac

SEQ ID NO: 530484 - RNA, 32 nt, Human
uguuacccuucaguaaguucuccccauuuuag

SEQ ID NO: 530485 - RNA, 32 nt, Human
uguuaccgccgcucagcgccccggcugggcgg

SEQ ID NO: 530486 - RNA, 21 nt, Human
uguuaccuagcuucccucuac

SEQ ID NO: 530487 - RNA, 32 nt, Human
uguuaccugcccacccucauccuuaccuccuc

SEQ ID NO: 530488 - RNA, 32 nt, Human
uguuaccugccugucucucccagcuucuuccc

SEQ ID NO: 530489 - RNA, 32 nt, Human
uguuaccugugagugugucucucccuauuaga

SEQ ID NO: 530490 - RNA, 32 nt, Human
uguuaccuuucuuuaccagcaugguaagcaac

SEQ ID NO: 530491 - RNA, 32 nt, Human
uguuacgcacacacacgugcacacaaggcucu

SEQ ID NO: 530492 - RNA, 32 nt, Human
uguuacgcuuucugcugucccuugccaaaaau

SEQ ID NO: 530493 - RNA, 32 nt, Human
uguuacggugcaugccuguaaucccagcuacu

SEQ ID NO: 530494 - RNA, 23 nt, Human
uguuacguacuguuucuuugaua

SEQ ID NO: 530495 - RNA, 32 nt, Human
uguuacuaguacuaagagaagcaccagaagag

SEQ ID NO: 530496 - RNA, 32 nt, Human
uguuacucaaagaaucacacuaaggauagcaa

SEQ ID NO: 530497 - RNA, 32 nt, Human
uguuacucauccugcuaucaauuucuuauuaa

SEQ ID NO: 530498 - RNA, 32 nt, Human
uguuacucaucuuuauugucuccaugauuuau

SEQ ID NO: 530499 - RNA, 32 nt, Human
uguuacucugauaaucccauaaaacaaaguuu

SEQ ID NO: 530500 - RNA, 32 nt, Human
uguuacucuuucucucuccaucagcuuccuca

SEQ ID NO: 530501 - RNA, 32 nt, Human
uguuacugaagaaugaacagaugaguaagugg

SEQ ID NO: 530502 - RNA, 32 nt, Human
uguuacugagacaaaacaguacucacugagug

SEQ ID NO: 530503 - RNA, 32 nt, Human
uguuacugcccagucauaaaucugcuuuucca

SEQ ID NO: 530504 - RNA, 32 nt, Human
uguuacuggagaguucuugaagccagggauac

SEQ ID NO: 530505 - RNA, 32 nt, Human
uguuacuggccuggaaacugaagggaguuuug

SEQ ID NO: 530506 - RNA, 32 nt, Human
uguuacugggcccugagucugggcagcugucc

SEQ ID NO: 530507 - RNA, 32 nt, Human
uguuacuguauaccugcuuucccacaacagca

SEQ ID NO: 530508 - RNA, 32 nt, Human
uguuacuguccagucucuacacaugcuguccu

SEQ ID NO: 530509 - RNA, 32 nt, Human
uguuacugugcaucucugggcauggccugugu

SEQ ID NO: 530510 - RNA, 32 nt, Human
uguuacuucccucacuucaccuccauaagaac

SEQ ID NO: 530511 - RNA, 32 nt, Human
uguuacuugcuacccugaguacuuucaggaag

SEQ ID NO: 530512 - RNA, 32 nt, Human
uguuacuuggauagcuuauaugaauuuugaga

SEQ ID NO: 530513 - RNA, 32 nt, Human
uguuacuuuugggacauccugucaucugagaa

SEQ ID NO: 530514 - RNA, 32 nt, Human
uguuagaacuccagaaaauaaaggacaaagac

SEQ ID NO: 530515 - RNA, 32 nt, Human
uguuagaauaaauucaugaaauucgauuccaa

SEQ ID NO: 530516 - RNA, 32 nt, Human
uguuagaaucugauuucaccucucagcaucca

SEQ ID NO: 530517 - RNA, 32 nt, Human
uguuagacagccacaguccugucuggguuagg

SEQ ID NO: 530518 - RNA, 21 nt, Human
uguuagagcaaacaaaugcau

SEQ ID NO: 530519 - RNA, 32 nt, Human
uguuagauacuauccuuuucaaugaugagcaa

SEQ ID NO: 530520 - RNA, 22 nt, Human
uguuagauauuaggucccauca

SEQ ID NO: 530521 - RNA, 32 nt, Human
uguuagauccuuguaagcaucgcuacccgagu

SEQ ID NO: 530522 - RNA, 32 nt, Human
uguuagaucugcagaaggggacacccuggaag

SEQ ID NO: 530523 - RNA, 32 nt, Human
uguuagauguuuauagcccagcaucuugggac

SEQ ID NO: 530524 - RNA, 32 nt, Human
uguuagcaagacugggaaggaggccacauucc

SEQ ID NO: 530525 - RNA, 18 nt, Human
uguuagcaaguguguggu

SEQ ID NO: 530526 - RNA, 32 nt, Human
uguuagcaaucagcugacuccugacucaacug

SEQ ID NO: 530527 - RNA, 32 nt, Human
uguuagcagaagcauguugaugugaauuauga

SEQ ID NO: 530528 - RNA, 32 nt, Human
uguuagcagagagaaaaauaacagugaaugug

SEQ ID NO: 530529 - RNA, 32 nt, Human
uguuagcagcuuugagaaaugcugcuauagga

SEQ ID NO: 530530 - RNA, 29 nt, Human
uguuagcauuugugugugucugugggugu

SEQ ID NO: 530531 - RNA, 32 nt, Human
uguuagcauuuuauggcauugucuccuggcug

SEQ ID NO: 530532 - RNA, 32 nt, Human
uguuagccacuacaccuggccuggauugugua

SEQ ID NO: 530533 - RNA, 32 nt, Human
uguuagccacucuuggaaaaagcacaaccuaa

SEQ ID NO: 530534 - RNA, 32 nt, Human
uguuagccagcagcuccagaaaaaucccgauu

SEQ ID NO: 530535 - RNA, 32 nt, Human
uguuagccauuucguauguauguaauaugcac

SEQ ID NO: 530536 - RNA, 32 nt, Human
uguuagccccuaacucuacugccuuccacaua

SEQ ID NO: 530537 - RNA, 22 nt, Human
uguuagcccucagagucccauu

SEQ ID NO: 530538 - RNA, 32 nt, Human
uguuagcccuuaucuucuguguguaaaaucca

SEQ ID NO: 530539 - RNA, 32 nt, Human
uguuagccucugcuuucccuuccuguccugag

SEQ ID NO: 530540 - RNA, 32 nt, Human
uguuagccuuucugcaccccuuagcuuggccc

SEQ ID NO: 530541 - RNA, 32 nt, Human
uguuagccuuuucuccccagacuuguuggcau

SEQ ID NO: 530542 - RNA, 31 nt, Human
uguuagcucacuagcuuuacauaccuuaucu

SEQ ID NO: 530543 - RNA, 32 nt, Human
uguuagcugcucacuuaaacaauguccucuuu

SEQ ID NO: 530544 - RNA, 32 nt, Human
uguuagcuggagaguugaggcaggcagcaaag

SEQ ID NO: 530545 - RNA, 32 nt, Human
uguuagcuguucugccuucugggugagcuggc

SEQ ID NO: 530546 - RNA, 32 nt, Human
uguuagcuuuauuaugcuaacagucuacuuug

SEQ ID NO: 530547 - RNA, 32 nt, Human
uguuaggaaccagcugcacagcaggagaguua

SEQ ID NO: 530548 - RNA, 32 nt, Human
uguuaggaaggaucuggaauaaucuugaaggg

SEQ ID NO: 530549 - RNA, 32 nt, Human
uguuaggauaaauaaauacuggauaaccucgu

SEQ ID NO: 530550 - RNA, 32 nt, Human
uguuaggauuacaggcaugagccacugcgccc

SEQ ID NO: 530551 - RNA, 32 nt, Human
uguuaggauuuguucuggacaaugaaggggau

SEQ ID NO: 530552 - RNA, 32 nt, Human
uguuaggcacacgugaugcacauguguacaug

SEQ ID NO: 530553 - RNA, 32 nt, Human
uguuaggcagaggcuucugaccaugucugagc

SEQ ID NO: 530554 - RNA, 20 nt, Human
uguuaggcagccaugugcuc

SEQ ID NO: 530555 - RNA, 32 nt, Human
uguuagggagagaagagggagaggcaggagcc

SEQ ID NO: 530556 - RNA, 32 nt, Human
uguuagggaggcaugauuuuggugagaucuuu

SEQ ID NO: 530557 - RNA, 24 nt, Human
uguuagggauggguagaugucaaa

SEQ ID NO: 530558 - RNA, 32 nt, Human
uguuaggggaggguugggaugggcagugggcc

SEQ ID NO: 530559 - RNA, 32 nt, Human
uguuaggggcaguggagguagaaugacuccuu

SEQ ID NO: 530560 - RNA, 32 nt, Human
uguuaggggcugggaacaagaaccccucucac

SEQ ID NO: 530561 - RNA, 32 nt, Human
uguuaggguagcaugggauuacagggcccugu

SEQ ID NO: 530562 - RNA, 32 nt, Human
uguuaggguccucccugcucccaugaggauau

SEQ ID NO: 530563 - RNA, 32 nt, Human
uguuagguagguucuguccaguucuuagggac

SEQ ID NO: 530564 - RNA, 32 nt, Human
uguuagguauuggggaagagagacugaaguca

SEQ ID NO: 530565 - RNA, 32 nt, Human
uguuagguuucuguggcuacugaauauuuguu

SEQ ID NO: 530566 - RNA, 32 nt, Human
uguuagucuuccuuuaagucauagaacuuauu

SEQ ID NO: 530567 - RNA, 32 nt, Human
uguuagugggauggcaaacacugugaacauug

SEQ ID NO: 530568 - RNA, 32 nt, Human
uguuaguggggauauuugcuguucauuuuucc

SEQ ID NO: 530569 - RNA, 32 nt, Human
uguuagugucaucucuauuagaugcuuuggag

SEQ ID NO: 530570 - RNA, 32 nt, Human
uguuaguguccuuccaaaauucauauguugaa

SEQ ID NO: 530571 - RNA, 32 nt, Human
uguuaguguucugaaguaaauacagaagaggc

SEQ ID NO: 530572 - RNA, 32 nt, Human
uguuaguucaugacagacccaggugugcuuca

SEQ ID NO: 530573 - RNA, 32 nt, Human
uguuaguucuucagauuccugucucuguaaua

SEQ ID NO: 530574 - RNA, 32 nt, Human
uguuaguugcucuuucuggcucugccucuccu

SEQ ID NO: 530575 - RNA, 32 nt, Human
uguuaguuucaucagaaacuuaaaacauagac

SEQ ID NO: 530576 - RNA, 32 nt, Human
uguuauaaaaguaaauuuaggccaggcacggu

SEQ ID NO: 530577 - RNA, 24 nt, Human
uguuauacaagguuaguccuucau

SEQ ID NO: 530578 - RNA, 32 nt, Human
uguuauacuguugacuguauaugggaacuaua

SEQ ID NO: 530579 - RNA, 32 nt, Human
uguuauauaaauuccacauuuuuaugcaacua

SEQ ID NO: 530580 - RNA, 24 nt, Human
uguuauaugaacauacaaaugcau

SEQ ID NO: 530581 - RNA, 20 nt, Human
uguuauaugaguagaaauca

SEQ ID NO: 530582 - RNA, 32 nt, Human
uguuauauugccuaggcuggaaugcagugguu

SEQ ID NO: 530583 - RNA, 32 nt, Human
uguuaucacaccacugcacuccagccugggug

SEQ ID NO: 530584 - RNA, 32 nt, Human
uguuaucagcuuucagggccaugguucacauu

SEQ ID NO: 530585 - RNA, 32 nt, Human
uguuaucagugaaacagaacuguaguaacucu

SEQ ID NO: 530586 - RNA, 32 nt, Human
uguuaucaugagggaauucugaucagggucaa

SEQ ID NO: 530587 - RNA, 32 nt, Human
uguuaucauuccuccccaacauaauaauacau

SEQ ID NO: 530588 - RNA, 24 nt, Human
uguuauccaggcuggugugcagug

SEQ ID NO: 530589 - RNA, 32 nt, Human
uguuauccaugugcauaauuuaccucaugauu

SEQ ID NO: 530590 - RNA, 32 nt, Human
uguuaucccacugcacucugcuuaaggguucc

SEQ ID NO: 530591 - RNA, 32 nt, Human
uguuauccuauuuagauggccaugaagaggau

SEQ ID NO: 530592 - RNA, 32 nt, Human
uguuauccuguauaccuccuccagccaugaag

SEQ ID NO: 530593 - RNA, 32 nt, Human
uguuauccuuuguauuuauaggcacaguuauc

SEQ ID NO: 530594 - RNA, 32 nt, Human
uguuaucgaauugggagaauggggaaaguugu

SEQ ID NO: 530595 - RNA, 32 nt, Human
uguuaucuugguguguuaagaguuagguuuaa

SEQ ID NO: 530596 - RNA, 32 nt, Human
uguuaugaaagugcuuauaggcauuuuguuua

SEQ ID NO: 530597 - RNA, 32 nt, Human
uguuaugacuuuccuuuguaucuuuccuuuua

SEQ ID NO: 530598 - RNA, 32 nt, Human
uguuaugauaggacacaguaguagcggugguc

SEQ ID NO: 530599 - RNA, 32 nt, Human
uguuaugaugauugguguggcuuuaugucuuu

SEQ ID NO: 530600 - RNA, 32 nt, Human
uguuaugauucugaacauuugacuugaaccac

SEQ ID NO: 530601 - RNA, 32 nt, Human
uguuaugcacacuaaauuaaaugugacauaaa

SEQ ID NO: 530602 - RNA, 32 nt, Human
uguuaugcagguggagagaaaacaggagagua

SEQ ID NO: 530603 - RNA, 32 nt, Human
uguuauggcuuccuugauaugcucuugacagc

SEQ ID NO: 530604 - RNA, 32 nt, Human
uguuaugggcacuggucuaggccagguaugac

SEQ ID NO: 530605 - RNA, 32 nt, Human
uguuauggugcugguaauaagccucgcagccc

SEQ ID NO: 530606 - RNA, 22 nt, Human
uguuaugugcaacacaaugcau

SEQ ID NO: 530607 - RNA, 32 nt, Human
uguuaugugguugaaagggcacuggacuuagu

SEQ ID NO: 530608 - RNA, 32 nt, Human
uguuaugugguuuauauuuuucuuucucuuuc

SEQ ID NO: 530609 - RNA, 32 nt, Human
uguuauguguuuugggggccugcacaggggca

SEQ ID NO: 530610 - RNA, 32 nt, Human
uguuauuacugaggaaagggaggagaggacaa

SEQ ID NO: 530611 - RNA, 32 nt, Human
uguuauuaguaauaccucuaguaguugauacu

SEQ ID NO: 530612 - RNA, 32 nt, Human
uguuauuaugccacucgcuuuaaccuauccca

SEQ ID NO: 530613 - RNA, 32 nt, Human
uguuauuccaauaguaaggagcagggaaauau

SEQ ID NO: 530614 - RNA, 32 nt, Human
uguuauuccagugcccuguaacaaucacuggu

SEQ ID NO: 530615 - RNA, 32 nt, Human
uguuauucugccuaccacaccuuccugccacu

SEQ ID NO: 530616 - RNA, 32 nt, Human
uguuauucugucuccucuucuuugucaucagc

SEQ ID NO: 530617 - RNA, 32 nt, Human
uguuauucugugacuugcuggagguuggcagu

SEQ ID NO: 530618 - RNA, 32 nt, Human
uguuauucuugcccucucuuuugaggcucucu

SEQ ID NO: 530619 - RNA, 32 nt, Human
uguuauugagguugagggagaagagaucgguc

SEQ ID NO: 530620 - RNA, 32 nt, Human
uguuauugcgggcaccuguaaucccagcuacu

SEQ ID NO: 530621 - RNA, 32 nt, Human
uguuauugcuacugcugcugccgccgccucug

SEQ ID NO: 530622 - RNA, 32 nt, Human
uguuauuggauuuccuggaagaugugguagcu

SEQ ID NO: 530623 - RNA, 32 nt, Human
uguuauuguuaugccaccauaccauuuuguua

SEQ ID NO: 530624 - RNA, 32 nt, Human
uguuauuuauucauccaugcacccagcugucc

SEQ ID NO: 530625 - RNA, 32 nt, Human
uguuauuugaaagcuuaaaggcauuuucucau

SEQ ID NO: 530626 - RNA, 32 nt, Human
uguuauuuuaaacagaagguuguauuauuaug

SEQ ID NO: 530627 - RNA, 31 nt, Human
uguuauuuuaauaaauaucucaugaaugagu

SEQ ID NO: 530628 - RNA, 32 nt, Human
uguuauuuucaaguagcugggauuuuaaacua

SEQ ID NO: 530629 - RNA, 32 nt, Human
uguuauuuucaggcuacaugcaacaguggauu

SEQ ID NO: 530630 - RNA, 32 nt, Human
uguuauuuuccaggaaccuucuccuggugucu

SEQ ID NO: 530631 - RNA, 32 nt, Human
uguuauuuuccugggauucaugauauuugaua

SEQ ID NO: 530632 - RNA, 32 nt, Human
uguuauuuuuccaucacuaaaggccaaucaga

SEQ ID NO: 530633 - RNA, 32 nt, Human
uguucaaacugagguggaaugcagugguuccc

SEQ ID NO: 530634 - RNA, 32 nt, Human
uguucaaagguuaggcacaccauugcuguuac

SEQ ID NO: 530635 - RNA, 32 nt, Human
uguucaaauguucacaaccacaaugcaucuga

SEQ ID NO: 530636 - RNA, 32 nt, Human
uguucaaauguuccuuuuaacggaugguugaa

SEQ ID NO: 530637 - RNA, 32 nt, Human
uguucaaauguucuuuuaauggucaguuuaau

SEQ ID NO: 530638 - RNA, 32 nt, Human
uguucaaauuuuucuccaucauugauuggcuu

SEQ ID NO: 530639 - RNA, 32 nt, Human
uguucaacagcggcaaacagugcagugaauau

SEQ ID NO: 530640 - RNA, 32 nt, Human
uguucaacauggcgaaaccccauucuaccaaa

SEQ ID NO: 530641 - RNA, 32 nt, Human
uguucaaccuguuuugaccucccaggcaucug

SEQ ID NO: 530642 - RNA, 32 nt, Human
uguucaaccuuguggccaucaucagcaaccug

SEQ ID NO: 530643 - RNA, 32 nt, Human
uguucaacuauccugaacuuuuguagaaguuc

SEQ ID NO: 530644 - RNA, 32 nt, Human
uguucaacuuccucucuguucaagccagccuu

SEQ ID NO: 530645 - RNA, 20 nt, Human
uguucaagacugcucuccau

SEQ ID NO: 530646 - RNA, 32 nt, Human
uguucaagacuguucaagacuggugauuugga

SEQ ID NO: 530647 - RNA, 32 nt, Human
uguucaagagcaauuucugcccuuuguaaauu

SEQ ID NO: 530648 - RNA, 32 nt, Human
uguucaaggaagaguggcucuuagcagaggca

SEQ ID NO: 530649 - RNA, 32 nt, Human
uguucaagguaaggagacaggaggaguaggag

SEQ ID NO: 530650 - RNA, 32 nt, Human
uguucaauaaauacacauuuggcaaagaugag

SEQ ID NO: 530651 - RNA, 32 nt, Human
uguucaauaaugacggacgcauugguugagau

SEQ ID NO: 530652 - RNA, 32 nt, Human
uguucaaucucucaccacaacuggaaguguug

SEQ ID NO: 530653 - RNA, 32 nt, Human
uguucaaucuuuuggcuucccugggccacauu

SEQ ID NO: 530654 - RNA, 32 nt, Human
uguucaaugcagagaauggaaaguacgcaucc

SEQ ID NO: 530655 - RNA, 32 nt, Human
uguucacacagaaaccuguacacaaacguuca

SEQ ID NO: 530656 - RNA, 32 nt, Human
uguucacacaugcacacucacgcucacacaug

SEQ ID NO: 530657 - RNA, 32 nt, Human
uguucacaccacugcacuccagucugggcaac

SEQ ID NO: 530658 - RNA, 32 nt, Human
uguucacaccgcugcacucaagcuugggugac

SEQ ID NO: 530659 - RNA, 32 nt, Human
uguucacacgcaaggcuggcucugccuuccca

SEQ ID NO: 530660 - RNA, 32 nt, Human
uguucacacuccauggaaaccccagacuggga

SEQ ID NO: 530661 - RNA, 32 nt, Human
uguucacagcauauuauuucugugacuggauu

SEQ ID NO: 530662 - RNA, 32 nt, Human
uguucacagcuggcugugggggccuuugagga

SEQ ID NO: 530663 - RNA, 32 nt, Human
uguucacauaugcacauacacauacucauaac

SEQ ID NO: 530664 - RNA, 32 nt, Human
uguucacauccuuugcccaugugucuaugagg

SEQ ID NO: 530665 - RNA, 32 nt, Human
uguucacaucuucgcucuggccagcccauucu

SEQ ID NO: 530666 - RNA, 32 nt, Human
uguucacccacuggcuucccccuucccacuga

SEQ ID NO: 530667 - RNA, 32 nt, Human
uguucacccuccugccaggaaaaucccagaaa

SEQ ID NO: 530668 - RNA, 32 nt, Human
uguucaccuuauugaagcucacucugauguua

SEQ ID NO: 530669 - RNA, 32 nt, Human
uguucacgggccugagcuucgaggccaggcuc

SEQ ID NO: 530670 - RNA, 32 nt, Human
uguucacuccacccucagaacucugccauguu

SEQ ID NO: 530671 - RNA, 32 nt, Human
uguucacucgcaucuucaccccaaacuucccu

SEQ ID NO: 530672 - RNA, 32 nt, Human
uguucacugaagacacuugagaaagaauccuc

SEQ ID NO: 530673 - RNA, 32 nt, Human
uguucacugcaaccucugccuuccaagaucaa

SEQ ID NO: 530674 - RNA, 32 nt, Human
uguucacugccaaacuccuucucauuuaaugc

SEQ ID NO: 530675 - RNA, 32 nt, Human
uguucacugguauuuggugcauuugcuuguaa

SEQ ID NO: 530676 - RNA, 32 nt, Human
uguucacugucuccucccagguucaacagaca

SEQ ID NO: 530677 - RNA, 32 nt, Human
uguucacuuccaggaacggucucgugggcugc

SEQ ID NO: 530678 - RNA, 32 nt, Human
uguucacuuguggagacuaggcugcaaugugc

SEQ ID NO: 530679 - RNA, 32 nt, Human
uguucacuuugcucaauuuuuccucuucacug

SEQ ID NO: 530680 - RNA, 32 nt, Human
uguucagaagcacaauacuaucuccugaaaga

SEQ ID NO: 530681 - RNA, 32 nt, Human
uguucagaauacuuaauaucuccucucuucau

SEQ ID NO: 530682 - RNA, 32 nt, Human
uguucagacagccacaugaggggacagugcag

SEQ ID NO: 530683 - RNA, 32 nt, Human
uguucagaccucuuggcccaaccugcucaccc

SEQ ID NO: 530684 - RNA, 32 nt, Human
uguucagacuccugguuucuuccaggcuuaca

SEQ ID NO: 530685 - RNA, 21 nt, Human
uguucagacuggagugcagug

SEQ ID NO: 530686 - RNA, 32 nt, Human
uguucagagaaggagaaggaaaagggcuugac

SEQ ID NO: 530687 - RNA, 32 nt, Human
uguucagagcaccagaugaagacuucauuggg

SEQ ID NO: 530688 - RNA, 32 nt, Human
uguucagagcaucagaugaagacuucauuggg

SEQ ID NO: 530689 - RNA, 32 nt, Human
uguucagagcuccuaaaacccuuguaauuucc

SEQ ID NO: 530690 - RNA, 32 nt, Human
uguucagaggcagagggugcaaaggagaaaug

SEQ ID NO: 530691 - RNA, 32 nt, Human
uguucagagggagccaggaaucuacaugggua

SEQ ID NO: 530692 - RNA, 32 nt, Human
uguucagauaaaugaagcugacuuauuuaagc

SEQ ID NO: 530693 - RNA, 32 nt, Human
uguucagaucccuaugggggcccagcuggcuc

SEQ ID NO: 530694 - RNA, 21 nt, Human
uguucagcaccucccauccca

SEQ ID NO: 530695 - RNA, 32 nt, Human
uguucagcagaacaccaccacugugacauggg

SEQ ID NO: 530696 - RNA, 32 nt, Human
uguucagcagcugaacauuccuggugagcaaa

SEQ ID NO: 530697 - RNA, 32 nt, Human
uguucagcagggcugaaagcuuuuauucuuua

SEQ ID NO: 530698 - RNA, 32 nt, Human
uguucagcauggcugaaauccacacuccguau

SEQ ID NO: 530699 - RNA, 32 nt, Human
uguucagccaucagaagagagacaaggaauua

SEQ ID NO: 530700 - RNA, 17 nt, Human
uguucagcuacuucaca

SEQ ID NO: 530701 - RNA, 32 nt, Human
uguucagcucaggcacaggggcacagcagagg

SEQ ID NO: 530702 - RNA, 32 nt, Human
uguucaggaaggccaaauuagagccuucucca

SEQ ID NO: 530703 - RNA, 32 nt, Human
uguucaggaucuuuauccgcagucuccacucc

SEQ ID NO: 530704 - RNA, 32 nt, Human
uguucaggauguugaagugcagugucagaaau

SEQ ID NO: 530705 - RNA, 32 nt, Human
uguucaggcugaggcaggagaauugcuugaac

SEQ ID NO: 530706 - RNA, 32 nt, Human
uguucagggagguguggacuggaugaggaaac

SEQ ID NO: 530707 - RNA, 32 nt, Human
uguucagggaucagcacuacugugcuucuugg

SEQ ID NO: 530708 - RNA, 31 nt, Human
uguucagggcacuucuuguccucucuguccc

SEQ ID NO: 530709 - RNA, 32 nt, Human
uguucagggccuugugugggggcaguacagga

SEQ ID NO: 530710 - RNA, 32 nt, Human
uguucagguucuggcaggggcccagggaucca

SEQ ID NO: 530711 - RNA, 32 nt, Human
uguucagucauuuuuguuucuaccucccagau

SEQ ID NO: 530712 - RNA, 32 nt, Human
uguucagucuccaucauggcaugccauacucu

SEQ ID NO: 530713 - RNA, 32 nt, Human
uguucagugaacccaagaaauguaauaaauau

SEQ ID NO: 530714 - RNA, 32 nt, Human
uguucagugagaaguaaacagagcagaaguga

SEQ ID NO: 530715 - RNA, 32 nt, Human
uguucagugucacccggaagcagaguuuaaug

SEQ ID NO: 530716 - RNA, 32 nt, Human
uguucaguucauguuguacgugauggagauuu

SEQ ID NO: 530717 - RNA, 32 nt, Human
uguucauagaagcagugugcaggugaggcaaa

SEQ ID NO: 530718 - RNA, 32 nt, Human
uguucauagccaggaaacccagcucagcaaac

SEQ ID NO: 530719 - RNA, 32 nt, Human
uguucaucccuugaccaccucuggaccacuaa

SEQ ID NO: 530720 - RNA, 32 nt, Human
uguucauccgugucccugcaaaggacaugaac

SEQ ID NO: 530721 - RNA, 32 nt, Human
uguucauccucuggugcugaagcagccaagag

SEQ ID NO: 530722 - RNA, 32 nt, Human
uguucauccugccauccccaacccuuuucuac

SEQ ID NO: 530723 - RNA, 32 nt, Human
uguucauccugccccugcuccauguccuugug

SEQ ID NO: 530724 - RNA, 32 nt, Human
uguucaucuccagcagagacaacggaggaggc

SEQ ID NO: 530725 - RNA, 32 nt, Human
uguucaucuccugagugugguacccagaaugg

SEQ ID NO: 530726 - RNA, 32 nt, Human
uguucaucugcagcuguugcaagguguucaga

SEQ ID NO: 530727 - RNA, 32 nt, Human
uguucaucuguggccauuccaucaggcaguua

SEQ ID NO: 530728 - RNA, 32 nt, Human
uguucaugaaccugggcuggagcuuggggacc

SEQ ID NO: 530729 - RNA, 32 nt, Human
uguucaugacacugcacuccagccugggugau

SEQ ID NO: 530730 - RNA, 32 nt, Human
uguucaugacacugcacuccagccuuggcaac

SEQ ID NO: 530731 - RNA, 21 nt, Human
uguucaugcaguucuaacaca

SEQ ID NO: 530732 - RNA, 32 nt, Human
uguucaugccacugcacuuccagccuggguga

SEQ ID NO: 530733 - RNA, 32 nt, Human
uguucaugcccaggaucugcugcgcucaugga

SEQ ID NO: 530734 - RNA, 32 nt, Human
uguucaugccucagugggaugaauccauuaca

SEQ ID NO: 530735 - RNA, 32 nt, Human
uguucauggaaagcaggacagacagaauugug

SEQ ID NO: 530736 - RNA, 32 nt, Human
uguucaugucacugcaagacucuuucucaguc

SEQ ID NO: 530737 - RNA, 32 nt, Human
uguucauucugaccccuuccucaaccucuuca

SEQ ID NO: 530738 - RNA, 32 nt, Human
uguucauugccucugccuugccccuaugccug

SEQ ID NO: 530739 - RNA, 32 nt, Human
uguucauugggcccuuucacaccccacaguga

SEQ ID NO: 530740 - RNA, 32 nt, Human
uguucauuucucacaaacuguacugacucgag

SEQ ID NO: 530741 - RNA, 32 nt, Human
uguucauuuugaaaagacuuuguucuuuucau

SEQ ID NO: 530742 - RNA, 32 nt, Human
uguucauuuuucacuccucccuccuaggucac

SEQ ID NO: 530743 - RNA, 23 nt, Human
uguuccaaagaaaaugcugccau

SEQ ID NO: 530744 - RNA, 32 nt, Human
uguuccaaaggaagcaacagcugagagaggcc

SEQ ID NO: 530745 - RNA, 32 nt, Human
uguuccaaagugcugauauuacaggcauaaua

SEQ ID NO: 530746 - RNA, 21 nt, Human
uguuccaagaugccaccaagg

SEQ ID NO: 530747 - RNA, 32 nt, Human
uguuccaaguagcugggauuacagacgccugc

SEQ ID NO: 530748 - RNA, 32 nt, Human
uguuccaauggaagaaagugaggacucacaga

SEQ ID NO: 530749 - RNA, 32 nt, Human
uguuccaccagaggagcggacagugaaaugua

SEQ ID NO: 530750 - RNA, 32 nt, Human
uguuccaccggcacuccuggguucugaggaca

SEQ ID NO: 530751 - RNA, 32 nt, Human
uguuccacgcugccuccuccucgaguuuuccu

SEQ ID NO: 530752 - RNA, 22 nt, Human
uguuccagaaagauuacuuuuu

SEQ ID NO: 530753 - RNA, 32 nt, Human
uguuccagagucagaaccuguacaguauauaa

SEQ ID NO: 530754 - RNA, 32 nt, Human
uguuccagauagacucucucucuuucugcccu

SEQ ID NO: 530755 - RNA, 32 nt, Human
uguuccagcacuguucaggcugccugucaucc

SEQ ID NO: 530756 - RNA, 20 nt, Human
uguuccagcccaucugucuc

SEQ ID NO: 530757 - RNA, 32 nt, Human
uguuccagcucccagagaagacucuaucacag

SEQ ID NO: 530758 - RNA, 32 nt, Human
uguuccagcuccgucugcccugugccuauaua

SEQ ID NO: 530759 - RNA, 22 nt, Human
uguuccagcucuugauguuuuu

SEQ ID NO: 530760 - RNA, 32 nt, Human
uguuccaggcacuguccuaggcauuugcaucu

SEQ ID NO: 530761 - RNA, 32 nt, Human
uguuccaggcuaacagcugugggaggcuucuc

SEQ ID NO: 530762 - RNA, 23 nt, Human
uguuccaggcuaacauacuuuuu

SEQ ID NO: 530763 - RNA, 32 nt, Human
uguuccagggagcucacggucuucucagguuc

SEQ ID NO: 530764 - RNA, 32 nt, Human
uguuccagugauguaaggauauuaaguuauua

SEQ ID NO: 530765 - RNA, 32 nt, Human
uguuccaguucuggucaagggccuugggggcu

SEQ ID NO: 530766 - RNA, 32 nt, Human
uguuccaguuuugacagcugccagucuuccug

SEQ ID NO: 530767 - RNA, 32 nt, Human
uguuccaucucuucucuuucuccccucuucgc

SEQ ID NO: 530768 - RNA, 32 nt, Human
uguuccaucuggccgugucagugcaaauugca

SEQ ID NO: 530769 - RNA, 32 nt, Human
uguuccaugcagucacucagggacccagucuc

SEQ ID NO: 530770 - RNA, 31 nt, Human
uguuccauuccucaacagguuggaugaugag

SEQ ID NO: 530771 - RNA, 32 nt, Human
uguuccauuuaucucuauccuccccuuaacaa

SEQ ID NO: 530772 - RNA, 32 nt, Human
uguuccauuuucuccacaaccuugccagcauc

SEQ ID NO: 530773 - RNA, 32 nt, Human
uguucccaaacaggacguacacccgagccaug

SEQ ID NO: 530774 - RNA, 32 nt, Human
uguucccaacuccaaggggaccuggugacaga

SEQ ID NO: 530775 - RNA, 32 nt, Human
uguucccaagccggggcucuuguucacaccac

SEQ ID NO: 530776 - RNA, 32 nt, Human
uguucccaccugcuggagugaaggggccaagg

SEQ ID NO: 530777 - RNA, 32 nt, Human
uguucccacucccaucuuucuuccggacaaug

SEQ ID NO: 530778 - RNA, 32 nt, Human
uguucccagcacucaagccuugccaccgccga

SEQ ID NO: 530779 - RNA, 21 nt, Human
uguucccagcagcgaaggccu

SEQ ID NO: 530780 - RNA, 32 nt, Human
uguucccagccccugcagauucugagcaaagg

SEQ ID NO: 530781 - RNA, 32 nt, Human
uguucccagcuauucaggaggcugagguggga

SEQ ID NO: 530782 - RNA, 32 nt, Human
uguucccaggaucuugagcuuuagugugcuau

SEQ ID NO: 530783 - RNA, 32 nt, Human
uguucccaggguggaagaaguaggggacagcu

SEQ ID NO: 530784 - RNA, 32 nt, Human
uguucccaguuacuugggaggcugagguggga

SEQ ID NO: 530785 - RNA, 32 nt, Human
uguucccaucuacugucugucaucuacaacag

SEQ ID NO: 530786 - RNA, 32 nt, Human
uguucccaucugaggacucagguaauggacuu

SEQ ID NO: 530787 - RNA, 32 nt, Human
uguucccaugccaccucugggguuucuguuau

SEQ ID NO: 530788 - RNA, 32 nt, Human
uguuccccaaccacggcccagcccugccacac

SEQ ID NO: 530789 - RNA, 28 nt, Human
uguuccccaaguguacuuaaucaccuua

SEQ ID NO: 530790 - RNA, 32 nt, Human
uguuccccaaguguacuuaaucaccuuagugc

SEQ ID NO: 530791 - RNA, 32 nt, Human
uguuccccaaguguccuggaaauuugccuggu

SEQ ID NO: 530792 - RNA, 32 nt, Human
uguuccccacacaccugaaggugguagaaucu

SEQ ID NO: 530793 - RNA, 32 nt, Human
uguuccccacagccuugacuucagagaggcuu

SEQ ID NO: 530794 - RNA, 32 nt, Human
uguuccccacucccuugccccaaaaggaucug

SEQ ID NO: 530795 - RNA, 24 nt, Human
uguuccccaggccggagugcagug

SEQ ID NO: 530796 - RNA, 24 nt, Human
uguuccccaggcuggagugcaaug

SEQ ID NO: 530797 - RNA, 32 nt, Human
uguuccccauggaugaagacucugcuguuuac

SEQ ID NO: 530798 - RNA, 32 nt, Human
uguucccccaaagcuuaucugucucugagccu

SEQ ID NO: 530799 - RNA, 32 nt, Human
uguucccccuccaucucgauucucguacccaa

SEQ ID NO: 530800 - RNA, 32 nt, Human
uguucccccuggaaugugcagugggccagcug

SEQ ID NO: 530801 - RNA, 32 nt, Human
uguuccccguccaagagcaaagcuacagucgg

SEQ ID NO: 530802 - RNA, 32 nt, Human
uguuccccgugaaaagcaacauggacauuucc

SEQ ID NO: 530803 - RNA, 22 nt, Human
uguuccccucacuggaugaaau

SEQ ID NO: 530804 - RNA, 32 nt, Human
uguuccccuccaggaugcugccggacuggaag

SEQ ID NO: 530805 - RNA, 32 nt, Human
uguuccccuccauguccauguguucucauugu

SEQ ID NO: 530806 - RNA, 32 nt, Human
uguuccccugccuuugugaugaugguuugguu

SEQ ID NO: 530807 - RNA, 32 nt, Human
uguucccgggcguguguggcucuggguccagc

SEQ ID NO: 530808 - RNA, 32 nt, Human
uguucccuagaaccucccugucuuccaacugc

SEQ ID NO: 530809 - RNA, 32 nt, Human
uguucccucaucaucccccuaccugaaccccu

SEQ ID NO: 530810 - RNA, 32 nt, Human
uguucccucccaacaguucuuccucuuucucu

SEQ ID NO: 530811 - RNA, 32 nt, Human
uguucccucccaccccagggcucuccaugcuu

SEQ ID NO: 530812 - RNA, 32 nt, Human
uguucccucccaggcccuccugggugagcccg

SEQ ID NO: 530813 - RNA, 21 nt, Human
uguucccucgccucugucucc

SEQ ID NO: 530814 - RNA, 32 nt, Human
uguucccucguuugcaaaaugaggaugauacu

SEQ ID NO: 530815 - RNA, 32 nt, Human
uguucccucuccaaucuuccagccuuugggag

SEQ ID NO: 530816 - RNA, 32 nt, Human
uguucccucucccucucccuguuggcuggugg

SEQ ID NO: 530817 - RNA, 32 nt, Human
uguucccucugccuagaacacucucucccaag

SEQ ID NO: 530818 - RNA, 32 nt, Human
uguucccucuucuccccuccacuguguuuaau

SEQ ID NO: 530819 - RNA, 32 nt, Human
uguucccugcagucugugcugugugucugggc

SEQ ID NO: 530820 - RNA, 32 nt, Human
uguucccugccucggcacagccguagccuccc

SEQ ID NO: 530821 - RNA, 32 nt, Human
uguucccuggaggcagguaucacaaagcauuu

SEQ ID NO: 530822 - RNA, 32 nt, Human
uguucccuggguuccugagagaggacauugag

SEQ ID NO: 530823 - RNA, 32 nt, Human
uguucccuuaccccuguaccugugaaggauug

SEQ ID NO: 530824 - RNA, 32 nt, Human
uguucccuuagguuuuuccccaccucaauuua

SEQ ID NO: 530825 - RNA, 32 nt, Human
uguucccuuccaccccuccaguuagucccuau

SEQ ID NO: 530826 - RNA, 32 nt, Human
uguucccuuccucugugccacgcuccucuguu

SEQ ID NO: 530827 - RNA, 32 nt, Human
uguucccuugcagccaaaccagcugaugaaga

SEQ ID NO: 530828 - RNA, 32 nt, Human
uguucccuuguggcuugggacauggcacaggc

SEQ ID NO: 530829 - RNA, 32 nt, Human
uguuccgcaauguggcugaggaagggagccaa

SEQ ID NO: 530830 - RNA, 32 nt, Human
uguuccgcuccuccuccagcuggcgcagcuuc

SEQ ID NO: 530831 - RNA, 32 nt, Human
uguuccggaacuccaguucugaggggucuuga

SEQ ID NO: 530832 - RNA, 32 nt, Human
uguuccggaaucuuaguugagggacaaacauu

SEQ ID NO: 530833 - RNA, 32 nt, Human
uguuccggcucuuccccagccucagcaucacc

SEQ ID NO: 530834 - RNA, 32 nt, Human
uguuccgggcaggcauuucaggaagaccgccu

SEQ ID NO: 530835 - RNA, 32 nt, Human
uguuccgggggcagccagugcccagccccacc

SEQ ID NO: 530836 - RNA, 32 nt, Human
uguuccguuugucaucugucauggucuccuuc

SEQ ID NO: 530837 - RNA, 32 nt, Human
uguuccuacuccacccuccccuggugauaagc

SEQ ID NO: 530838 - RNA, 32 nt, Human
uguuccuacuggcuggucccagccgacaguuc

SEQ ID NO: 530839 - RNA, 32 nt, Human
uguuccuacuguggcccagcugcccagcaugg

SEQ ID NO: 530840 - RNA, 32 nt, Human
uguuccuaguugcaacaguucuuggaaaccca

SEQ ID NO: 530841 - RNA, 32 nt, Human
uguuccuauagucccagcacuuugggaggcug

SEQ ID NO: 530842 - RNA, 32 nt, Human
uguuccuaucagcagguggccccugggcauca

SEQ ID NO: 530843 - RNA, 32 nt, Human
uguuccuauuauccuccagccucuggguaugc

SEQ ID NO: 530844 - RNA, 32 nt, Human
uguuccuauuguucuuucuaugugccagguac

SEQ ID NO: 530845 - RNA, 32 nt, Human
uguuccucaccuuaucuucaggcaagaaacca

SEQ ID NO: 530846 - RNA, 32 nt, Human
uguuccucacgccagcggucagcugcggguug

SEQ ID NO: 530847 - RNA, 32 nt, Human
uguuccucauagauggcaccaucuuguguccu

SEQ ID NO: 530848 - RNA, 32 nt, Human
uguuccuccaaagcauucuccccagcaugucu

SEQ ID NO: 530849 - RNA, 32 nt, Human
uguuccuccacacauguaaaggcacaguggcu

SEQ ID NO: 530850 - RNA, 32 nt, Human
uguuccuccaccucuugcuccaaucagagguc

SEQ ID NO: 530851 - RNA, 32 nt, Human
uguuccucccaaagugcugggauuaauggcgu

SEQ ID NO: 530852 - RNA, 32 nt, Human
uguuccucccugauguucagaaugaccuaugc

SEQ ID NO: 530853 - RNA, 32 nt, Human
uguuccuccggcugccuccauggaggcagugc

SEQ ID NO: 530854 - RNA, 32 nt, Human
uguuccuccucauccucuucugagacuguugu

SEQ ID NO: 530855 - RNA, 32 nt, Human
uguuccuccuccccucuccuaucagcccuaau

SEQ ID NO: 530856 - RNA, 32 nt, Human
uguuccuccucuuccuucgcuucagccucuuc

SEQ ID NO: 530857 - RNA, 32 nt, Human
uguuccuccugccucauccuccugaguagcug

SEQ ID NO: 530858 - RNA, 32 nt, Human
uguuccucggcauugcgggccuggugggcaga

SEQ ID NO: 530859 - RNA, 32 nt, Human
uguuccucgucgggcaaaagauaaggauccga

SEQ ID NO: 530860 - RNA, 32 nt, Human
uguuccucuccaccaguguaucccaaguaguc

SEQ ID NO: 530861 - RNA, 32 nt, Human
uguuccucucuacaagaaccugggaggccaac

SEQ ID NO: 530862 - RNA, 32 nt, Human
uguuccucucuagccugugcucuccauaugcu

SEQ ID NO: 530863 - RNA, 32 nt, Human
uguuccucucugcuuuguucuucccuggacug

SEQ ID NO: 530864 - RNA, 32 nt, Human
uguuccucuggggcagcccccaccuccguccu

SEQ ID NO: 530865 - RNA, 32 nt, Human
uguuccucuguccugguaacauucuccuucua

SEQ ID NO: 530866 - RNA, 32 nt, Human
uguuccucuuucuccccgacuccaccccagcu

SEQ ID NO: 530867 - RNA, 32 nt, Human
uguuccucuuuggucccaagagcagcagccgc

SEQ ID NO: 530868 - RNA, 29 nt, Human
uguuccugaaugcacucauccccucaaag

SEQ ID NO: 530869 - RNA, 22 nt, Human
uguuccugaggcagcacuuuua

SEQ ID NO: 530870 - RNA, 32 nt, Human
uguuccugagggaggccgguguggaaagccuu

SEQ ID NO: 530871 - RNA, 32 nt, Human
uguuccugcaccugccgguuauuuccaagaag

SEQ ID NO: 530872 - RNA, 32 nt, Human
uguuccugcacuccacccugcuggccccagga

SEQ ID NO: 530873 - RNA, 32 nt, Human
uguuccugccucuccgccaccuccaccgcggc

SEQ ID NO: 530874 - RNA, 32 nt, Human
uguuccugcuaccuuccugaccccugugcuca

SEQ ID NO: 530875 - RNA, 32 nt, Human
uguuccugcucacucuuugccuucuccuucuc

SEQ ID NO: 530876 - RNA, 32 nt, Human
uguuccugcucacuucaagcuucuuccaugga

SEQ ID NO: 530877 - RNA, 32 nt, Human
uguuccugcucgguuucuggauugcuugguac

SEQ ID NO: 530878 - RNA, 32 nt, Human
uguuccuggcaaccugucuucuguuaccucag

SEQ ID NO: 530879 - RNA, 32 nt, Human
uguuccuggccugcugguucagugggcuggcu

SEQ ID NO: 530880 - RNA, 23 nt, Human
uguuccuggcugcuguguuucca

SEQ ID NO: 530881 - RNA, 32 nt, Human
uguuccugggaucgggcugaggccaggccucu

SEQ ID NO: 530882 - RNA, 22 nt, Human
uguuccuggugaagcaguuuca

SEQ ID NO: 530883 - RNA, 23 nt, Human
uguuccugguuuaaagccuuuca

SEQ ID NO: 530884 - RNA, 32 nt, Human
uguuccuguagucccagcacucugggaaccug

SEQ ID NO: 530885 - RNA, 32 nt, Human
uguuccuguagucccagcuccccaggaggcug

SEQ ID NO: 530886 - RNA, 32 nt, Human
uguuccuguauuguggccuggugccauuuuug

SEQ ID NO: 530887 - RNA, 32 nt, Human
uguuccugucaggauuuguuucccucugcugu

SEQ ID NO: 530888 - RNA, 32 nt, Human
uguuccuguccugucuucacugagcgcagggc

SEQ ID NO: 530889 - RNA, 32 nt, Human
uguuccugugcaaauaaugaaagagcucggua

SEQ ID NO: 530890 - RNA, 32 nt, Human
uguuccugugucugagccuggaagaggcucgg

SEQ ID NO: 530891 - RNA, 32 nt, Human
uguuccuuacaucuuccaguuggaggugaguu

SEQ ID NO: 530892 - RNA, 32 nt, Human
uguuccuuagguugcacuagucggggguucca

SEQ ID NO: 530893 - RNA, 32 nt, Human
uguuccuucuacugcuuuucaguucccuuccc

SEQ ID NO: 530894 - RNA, 32 nt, Human
uguuccuugaaaugcuaaacuuaauggcugua

SEQ ID NO: 530895 - RNA, 32 nt, Human
uguuccuugaggauuugucacagucugcccac

SEQ ID NO: 530896 - RNA, 32 nt, Human
uguuccuugcagcccccucccucucagguguc

SEQ ID NO: 530897 - RNA, 32 nt, Human
uguuccuugccugagagucacugaaggaaauu

SEQ ID NO: 530898 - RNA, 32 nt, Human
uguuccuugguaaacugcucuuagcuaagaug

SEQ ID NO: 530899 - RNA, 32 nt, Human
uguuccuuguuuccuuuuauucuuccaucuga

SEQ ID NO: 530900 - RNA, 32 nt, Human
uguuccuuuccccucaccugcuugccuccuua

SEQ ID NO: 530901 - RNA, 32 nt, Human
uguuccuuuucccacuuucuggguggcuuuuu

SEQ ID NO: 530902 - RNA, 32 nt, Human
uguucgaggacucgcgggugugcagugcaccu

SEQ ID NO: 530903 - RNA, 32 nt, Human
uguucgaguccucugugccugcccuggcguuc

SEQ ID NO: 530904 - RNA, 32 nt, Human
uguucgcacauccugugugugcacagcugucc

SEQ ID NO: 530905 - RNA, 32 nt, Human
uguucgcaccacugcacuccagccugggugau

SEQ ID NO: 530906 - RNA, 32 nt, Human
uguucgcccagugccacgucugcaugugaagc

SEQ ID NO: 530907 - RNA, 32 nt, Human
uguucgccucaucuaaccccugccugcagggu

SEQ ID NO: 530908 - RNA, 32 nt, Human
uguucgccucucaaggagagcuuugauccuca

SEQ ID NO: 530909 - RNA, 32 nt, Human
uguucgcuccgguucuuggugaagacaggguu

SEQ ID NO: 530910 - RNA, 30 nt, Human
uguucgcuuggcuccaugcuccucacugcc

SEQ ID NO: 530911 - RNA, 32 nt, Human
uguucggaggggugaaagcauuaagaagccca

SEQ ID NO: 530912 - RNA, 32 nt, Human
uguucggcaaaaggaccuccaccaagacugaa

SEQ ID NO: 530913 - RNA, 32 nt, Human
uguucggcaccugucugugccucuggcaccag

SEQ ID NO: 530914 - RNA, 32 nt, Human
uguucgggaggcaaauuucccuaggaaaaaga

SEQ ID NO: 530915 - RNA, 32 nt, Human
uguucguauuagagacaaaaucuguguaacag

SEQ ID NO: 530916 - RNA, 32 nt, Human
uguucgucacucaaaugaauuugcuaaauaca

SEQ ID NO: 530917 - RNA, 32 nt, Human
uguucguccugagacggagucucgcucugucg

SEQ ID NO: 530918 - RNA, 32 nt, Human
uguucgugcccgaggcugcgcagcacugaggu

SEQ ID NO: 530919 - RNA, 32 nt, Human
uguucguggacgagaacacguucuccaacgac

SEQ ID NO: 530920 - RNA, 32 nt, Human
uguucguggacgagaacacguucuccagcgac

SEQ ID NO: 530921 - RNA, 32 nt, Human
uguucguguguauugucagugugugcuagcug

SEQ ID NO: 530922 - RNA, 32 nt, Human
uguucguuaauauccauguaacaaucccauug

SEQ ID NO: 530923 - RNA, 32 nt, Human
uguucguucugagacggagucucgcucugucg

SEQ ID NO: 530924 - RNA, 32 nt, Human
uguucguuucaucaggcucuguuccucaaugg

SEQ ID NO: 530925 - RNA, 32 nt, Human
uguucguuugaguggugacauccagguggcag

SEQ ID NO: 530926 - RNA, 32 nt, Human
uguucguuuugcaguguguccauacgguuccu

SEQ ID NO: 530927 - RNA, 32 nt, Human
uguucuaaaaugggauuuaacuauagaaaugu

SEQ ID NO: 530928 - RNA, 32 nt, Human
uguucuaaccaauaaacagaacuauuucuuac

SEQ ID NO: 530929 - RNA, 22 nt, Human
uguucuaagaaaugcagcgaug

SEQ ID NO: 530930 - RNA, 32 nt, Human
uguucuaagaacggaagcaucugggcuggaug

SEQ ID NO: 530931 - RNA, 32 nt, Human
uguucuaauauugggacuucugauuauguuca

SEQ ID NO: 530932 - RNA, 23 nt, Human
uguucuacaccaacgcccuggca

SEQ ID NO: 530933 - RNA, 32 nt, Human
uguucuacagucucagggagguggugggcggg

SEQ ID NO: 530934 - RNA, 32 nt, Human
uguucuaccagaaaaacgucucccaaucaccc

SEQ ID NO: 530935 - RNA, 32 nt, Human
uguucuagagcuuccuacaggcagagucaggc

SEQ ID NO: 530936 - RNA, 32 nt, Human
uguucuagggaacggaaaagaguucauggcca

SEQ ID NO: 530937 - RNA, 32 nt, Human
uguucuaggugguggcuaaaucugggccuaau

SEQ ID NO: 530938 - RNA, 32 nt, Human
uguucuagugcauuuccaugguccccaauuca

SEQ ID NO: 530939 - RNA, 32 nt, Human
uguucuauacacuaucaaauauauaaagcuuu

SEQ ID NO: 530940 - RNA, 32 nt, Human
uguucuauagcauccuccugugcucuuaccua

SEQ ID NO: 530941 - RNA, 32 nt, Human
uguucuaucuuucugucccaccugcacuggga

SEQ ID NO: 530942 - RNA, 32 nt, Human
uguucuauuuugggguacugguuuucuaucca

SEQ ID NO: 530943 - RNA, 32 nt, Human
uguucucaaaucagaagaauugcaaaagaaug

SEQ ID NO: 530944 - RNA, 32 nt, Human
uguucucacaccauuucacuuccucuuccucu

SEQ ID NO: 530945 - RNA, 32 nt, Human
uguucucacagaacagaaccccacagcuggau

SEQ ID NO: 530946 - RNA, 31 nt, Human
uguucucacagcuggcgggaagcaagcgccu

SEQ ID NO: 530947 - RNA, 20 nt, Human
uguucucacaucucuguccc

SEQ ID NO: 530948 - RNA, 22 nt, Human
uguucucaccucaugcugcucc

SEQ ID NO: 530949 - RNA, 21 nt, Human
uguucucaccucugcuguccc

SEQ ID NO: 530950 - RNA, 32 nt, Human
uguucucacucguaagugggaauugacaauga

SEQ ID NO: 530951 - RNA, 32 nt, Human
uguucucacuuaaaaguggaagcugacaauga

SEQ ID NO: 530952 - RNA, 32 nt, Human
uguucucagaguugcgcuuuugaggagugguu

SEQ ID NO: 530953 - RNA, 32 nt, Human
uguucucagccuccugaguacuuaccagaguu

SEQ ID NO: 530954 - RNA, 24 nt, Human
uguucucagcucccagcgaagccu

SEQ ID NO: 530955 - RNA, 20 nt, Human
uguucucagcucccccuguc

SEQ ID NO: 530956 - RNA, 22 nt, Human
uguucucagcucccccuguccc

SEQ ID NO: 530957 - RNA, 32 nt, Human
uguucucagcucccccuguccccucagcucca

SEQ ID NO: 530958 - RNA, 22 nt, Human
uguucucaggcugcuccuccau

SEQ ID NO: 530959 - RNA, 21 nt, Human
uguucucaguacgaaaaaccu

SEQ ID NO: 530960 - RNA, 32 nt, Human
uguucucaguaugcaaaaccugaaaucagaug

SEQ ID NO: 530961 - RNA, 31 nt, Human
uguucucaguuucaggcaacugauuucaaau

SEQ ID NO: 530962 - RNA, 32 nt, Human
uguucucaucccugguuccuuggccacggugg

SEQ ID NO: 530963 - RNA, 21 nt, Human
uguucucauucuuuucacucc

SEQ ID NO: 530964 - RNA, 23 nt, Human
uguucucauuuagauuuaucucc

SEQ ID NO: 530965 - RNA, 32 nt, Human
uguucuccagccugggcaacagagugaguccc

SEQ ID NO: 530966 - RNA, 32 nt, Human
uguucuccauaggagggaaggagcagucacug

SEQ ID NO: 530967 - RNA, 32 nt, Human
uguucucccagagcugcaccugccucgcagag

SEQ ID NO: 530968 - RNA, 32 nt, Human
uguucucccucacucugcccuuaguuaauaga

SEQ ID NO: 530969 - RNA, 32 nt, Human
uguucucccucccugccauuguggacucuugu

SEQ ID NO: 530970 - RNA, 32 nt, Human
uguucucccuuucucucuccucucugcuucau

SEQ ID NO: 530971 - RNA, 32 nt, Human
uguucuccgggaccacacagccuccaccaugu

SEQ ID NO: 530972 - RNA, 32 nt, Human
uguucuccuacagaaaagugauucugugaggg

SEQ ID NO: 530973 - RNA, 32 nt, Human
uguucuccucacugccucuuccuauuaggagg

SEQ ID NO: 530974 - RNA, 32 nt, Human
uguucuccucgagggcuccagcauccucugcu

SEQ ID NO: 530975 - RNA, 32 nt, Human
uguucuccuuucucuuucuuuugccuauuaaa

SEQ ID NO: 530976 - RNA, 32 nt, Human
uguucucggauuucaccuuaaaggaggaaggc

SEQ ID NO: 530977 - RNA, 32 nt, Human
uguucucuaacagggccagcugagcagcacag

SEQ ID NO: 530978 - RNA, 32 nt, Human
uguucucuaugcccacugcccuccucccucuc

SEQ ID NO: 530979 - RNA, 32 nt, Human
uguucucucaggacuccugggucccagggguc

SEQ ID NO: 530980 - RNA, 32 nt, Human
uguucucuccaccuucaguuuagcgucauucc

SEQ ID NO: 530981 - RNA, 32 nt, Human
uguucucuccaucucccuagucaucauuuuca

SEQ ID NO: 530982 - RNA, 32 nt, Human
uguucucucccaggggcuggcuucaggaggga

SEQ ID NO: 530983 - RNA, 32 nt, Human
uguucucucugagccuggaugggcuuggggcc

SEQ ID NO: 530984 - RNA, 32 nt, Human
uguucucugaguaugcagcagugcaguugaag

SEQ ID NO: 530985 - RNA, 32 nt, Human
uguucucugauugugaggucacugugaaugau

SEQ ID NO: 530986 - RNA, 32 nt, Human
uguucucugcauccccucaccaccuuccuuug

SEQ ID NO: 530987 - RNA, 32 nt, Human
uguucucugcucccauccuucgcucaccagcu

SEQ ID NO: 530988 - RNA, 22 nt, Human
uguucucuggcaaauucuucac

SEQ ID NO: 530989 - RNA, 32 nt, Human
uguucucuguaagcuucauccaugcugguuau

SEQ ID NO: 530990 - RNA, 32 nt, Human
uguucucuguacugggcccccuugcccuguuc

SEQ ID NO: 530991 - RNA, 32 nt, Human
uguucucugucgugagugucucuugucuaaac

SEQ ID NO: 530992 - RNA, 32 nt, Human
uguucucuguucuguuucccaaugcagaaaag

SEQ ID NO: 530993 - RNA, 32 nt, Human
uguucucuguuguaugagaaacugacaccaag

SEQ ID NO: 530994 - RNA, 32 nt, Human
uguucucuuauuucugaggcccuucagucucc

SEQ ID NO: 530995 - RNA, 32 nt, Human
uguucucuuccugcccauuuccuugaaccucc

SEQ ID NO: 530996 - RNA, 32 nt, Human
uguucucuugcccaggcuggagugcaguggca

SEQ ID NO: 530997 - RNA, 32 nt, Human
uguucucuuuggcauaaucugccuugcacucu

SEQ ID NO: 530998 - RNA, 32 nt, Human
uguucucuuuucucaguuaucucccuccucaa

SEQ ID NO: 530999 - RNA, 32 nt, Human
uguucugaaaccacuggugucugcucagaugu

SEQ ID NO: 531000 - RNA, 32 nt, Human
uguucugaaacuaacagugaggggacaaagca

SEQ ID NO: 531001 - RNA, 32 nt, Human
uguucugaacugcucccuucccuccguuccuu

SEQ ID NO: 531002 - RNA, 32 nt, Human
uguucugaaggauacucuccuccaucaccccu

SEQ ID NO: 531003 - RNA, 32 nt, Human
uguucugagaucaggaaguaacagugagaguc

SEQ ID NO: 531004 - RNA, 32 nt, Human
uguucugagaucaugcaucucccacccaucug

SEQ ID NO: 531005 - RNA, 32 nt, Human
uguucugagauggacaaauucaguguuggaaa

SEQ ID NO: 531006 - RNA, 32 nt, Human
uguucugaggagaccugcacuugagaacaaaa

SEQ ID NO: 531007 - RNA, 32 nt, Human
uguucugaggccuuuagccucugaaugauacc

SEQ ID NO: 531008 - RNA, 32 nt, Human
uguucugagucccugaggguuuacugugaagu

SEQ ID NO: 531009 - RNA, 32 nt, Human
uguucugauauuggacaguaaaauccacagac

SEQ ID NO: 531010 - RNA, 32 nt, Human
uguucugaucacuggucugugcccucacagca

SEQ ID NO: 531011 - RNA, 32 nt, Human
uguucugcaaccugugguuugggugugaggaa

SEQ ID NO: 531012 - RNA, 32 nt, Human
uguucugcaggcagccagaaaaggaggaggca

SEQ ID NO: 531013 - RNA, 32 nt, Human
uguucugcagucaucuccccuccuggcgaguu

SEQ ID NO: 531014 - RNA, 32 nt, Human
uguucugcaucccagacuccagccggcucucc

SEQ ID NO: 531015 - RNA, 16 nt, Human
uguucugccccgcaag

SEQ ID NO: 531016 - RNA, 32 nt, Human
uguucugccuguccucgcucucuccccgccua

SEQ ID NO: 531017 - RNA, 32 nt, Human
uguucugcgccaagcuccuaucaugccaauug

SEQ ID NO: 531018 - RNA, 32 nt, Human
uguucugcuacuugagaucauggggaacauau

SEQ ID NO: 531019 - RNA, 32 nt, Human
uguucugcucucacuuguccacuguggccuug

SEQ ID NO: 531020 - RNA, 32 nt, Human
uguucugcugcccagguuggagugcaguggca

SEQ ID NO: 531021 - RNA, 24 nt, Human
uguucugcuugcguuuuugaaaca

SEQ ID NO: 531022 - RNA, 21 nt, Human
uguucuggaaaacaagagggc

SEQ ID NO: 531023 - RNA, 32 nt, Human
uguucuggaaacaaaguacuguugaaaccagc

SEQ ID NO: 531024 - RNA, 32 nt, Human
uguucuggaacagggugaaacucucccagaga

SEQ ID NO: 531025 - RNA, 32 nt, Human
uguucuggaggcaccagaccuugaaaagaaca

SEQ ID NO: 531026 - RNA, 32 nt, Human
uguucuggaggcaccaugacaaagcaccagac

SEQ ID NO: 531027 - RNA, 32 nt, Human
uguucuggaguggaaagagcacgauagagcac

SEQ ID NO: 531028 - RNA, 32 nt, Human
uguucuggaguggccuguagcagacacugaac

SEQ ID NO: 531029 - RNA, 32 nt, Human
uguucuggcauuuccaguuguuccacacuccc

SEQ ID NO: 531030 - RNA, 32 nt, Human
uguucuggccagaaggaggagccaagacccac

SEQ ID NO: 531031 - RNA, 32 nt, Human
uguucuggcuagaugagagggaacccaggaau

SEQ ID NO: 531032 - RNA, 32 nt, Human
uguucuggcucuuccaggcugggagagccuuu

SEQ ID NO: 531033 - RNA, 32 nt, Human
uguucuggcuguggcccugccuuagacugucu

SEQ ID NO: 531034 - RNA, 32 nt, Human
uguucugggaaggccugggugugugcacaagg

SEQ ID NO: 531035 - RNA, 32 nt, Human
uguucugggagcacagaugauaagcucuggaa

SEQ ID NO: 531036 - RNA, 32 nt, Human
uguucugggaggaccccuaaaagggagcagcu

SEQ ID NO: 531037 - RNA, 32 nt, Human
uguucugggccucaugggggcagcgggaggug

SEQ ID NO: 531038 - RNA, 18 nt, Human
uguucuggggcaggggga

SEQ ID NO: 531039 - RNA, 32 nt, Human
uguucuggggcugggccucggugcaggucugg

SEQ ID NO: 531040 - RNA, 32 nt, Human
uguucuggguguucaggugcagcugguccucc

SEQ ID NO: 531041 - RNA, 32 nt, Human
uguucuggucaccaugccaguaguccuagguu

SEQ ID NO: 531042 - RNA, 32 nt, Human
uguucuggucccgggggcgcagcuuggagagc

SEQ ID NO: 531043 - RNA, 32 nt, Human
uguucugguggagugggaagggaggcuugggu

SEQ ID NO: 531044 - RNA, 32 nt, Human
uguucugguuacuguucuaaggcugugccauc

SEQ ID NO: 531045 - RNA, 31 nt, Human
uguucuguaaaauuagucuguugaaaauguu

SEQ ID NO: 531046 - RNA, 32 nt, Human
uguucuguaacccaggcuggagugcaguggcc

SEQ ID NO: 531047 - RNA, 32 nt, Human
uguucuguacagaguaaugagaugugugacgg

SEQ ID NO: 531048 - RNA, 21 nt, Human
uguucuguacuuuuuggcaua

SEQ ID NO: 531049 - RNA, 32 nt, Human
uguucuguaggcacuuugagaagaggaagagu

SEQ ID NO: 531050 - RNA, 32 nt, Human
uguucugucacccaggcuggagugcaguggca

SEQ ID NO: 531051 - RNA, 32 nt, Human
uguucugucacccaggcuggagugcaguggug

SEQ ID NO: 531052 - RNA, 32 nt, Human
uguucugucacccaggcuggggugcaguggcg

SEQ ID NO: 531053 - RNA, 32 nt, Human
uguucugucaccuaggcuggaaugcaguggug

SEQ ID NO: 531054 - RNA, 32 nt, Human
uguucugucaccuaggguggagugcaguggca

SEQ ID NO: 531055 - RNA, 32 nt, Human
uguucugucacucaggcuggaguacaguggug

SEQ ID NO: 531056 - RNA, 32 nt, Human
uguucugucgcccaggcuggcgugcaguggcg

SEQ ID NO: 531057 - RNA, 32 nt, Human
uguucugucucccaggcugaagugcagugagu

SEQ ID NO: 531058 - RNA, 32 nt, Human
uguucugucugaaaauuuguagaugggucuaa

SEQ ID NO: 531059 - RNA, 32 nt, Human
uguucugugaauagcaguggcaaaauauuaug

SEQ ID NO: 531060 - RNA, 25 nt, Human
uguucugugcuggacuucuaauaua

SEQ ID NO: 531061 - RNA, 32 nt, Human
uguucugugguuuuccccucccuggguucaga

SEQ ID NO: 531062 - RNA, 32 nt, Human
uguucugugucacucggcccuggguagucuac

SEQ ID NO: 531063 - RNA, 23 nt, Human
uguucugugucagcacccaggac

SEQ ID NO: 531064 - RNA, 21 nt, Human
uguucuguucaucuaaaugca

SEQ ID NO: 531065 - RNA, 32 nt, Human
uguucuguuccuccuccucaugcauuuccagc

SEQ ID NO: 531066 - RNA, 22 nt, Human
uguucuguucuaugccuaagca

SEQ ID NO: 531067 - RNA, 19 nt, Human
uguucuguucuccuaauac

SEQ ID NO: 531068 - RNA, 32 nt, Human
uguucuguugacuggggcccugcagacucugg

SEQ ID NO: 531069 - RNA, 32 nt, Human
uguucuguugaucccacuucacugugagggga

SEQ ID NO: 531070 - RNA, 32 nt, Human
uguucuguugcccaggagggagugcaguggug

SEQ ID NO: 531071 - RNA, 32 nt, Human
uguucuguugccugggcuggagugcaguggca

SEQ ID NO: 531072 - RNA, 32 nt, Human
uguucuguugccugggcuggagugcaguggcg

SEQ ID NO: 531073 - RNA, 32 nt, Human
uguucuguuggaagagucucuggcccagucau

SEQ ID NO: 531074 - RNA, 24 nt, Human
uguucuguuucaccauguaacaca

SEQ ID NO: 531075 - RNA, 32 nt, Human
uguucuguuuuugcuuuuccucuucuugacca

SEQ ID NO: 531076 - RNA, 32 nt, Human
uguucuuaaaccgacucagugugucauccccg

SEQ ID NO: 531077 - RNA, 32 nt, Human
uguucuuaagggagguuuguucuggugcauug

SEQ ID NO: 531078 - RNA, 32 nt, Human
uguucuuagauaugggccucucagccuggcag

SEQ ID NO: 531079 - RNA, 32 nt, Human
uguucuuaggauucugacuaagaggcaaaaga

SEQ ID NO: 531080 - RNA, 32 nt, Human
uguucuuaggcauucuaucuuugcucaaauug

SEQ ID NO: 531081 - RNA, 19 nt, Human
uguucuuaggggucacuga

SEQ ID NO: 531082 - RNA, 32 nt, Human
uguucuuauccaaugggaccucuccuugggaa

SEQ ID NO: 531083 - RNA, 32 nt, Human
uguucuucagcagccugucauaggaacuggau

SEQ ID NO: 531084 - RNA, 32 nt, Human
uguucuucagugcuggagguccuggcaggguc

SEQ ID NO: 531085 - RNA, 32 nt, Human
uguucuucauccccuucucccugcagggcauc

SEQ ID NO: 531086 - RNA, 32 nt, Human
uguucuucccuaauacuuucuuuacuucacaa

SEQ ID NO: 531087 - RNA, 32 nt, Human
uguucuucccucagccucgccugcugugcuga

SEQ ID NO: 531088 - RNA, 32 nt, Human
uguucuucccugaucaguccucccagacugca

SEQ ID NO: 531089 - RNA, 32 nt, Human
uguucuuccuucacaaccuucugagccuucuu

SEQ ID NO: 531090 - RNA, 32 nt, Human
uguucuuccuucuuccucagucuuccugucca

SEQ ID NO: 531091 - RNA, 32 nt, Human
uguucuucuccuucagcuucggcuucacccac

SEQ ID NO: 531092 - RNA, 32 nt, Human
uguucuucucuuaagaggcuuccagagaaaac

SEQ ID NO: 531093 - RNA, 21 nt, Human
uguucuugaacuccugacaua

SEQ ID NO: 531094 - RNA, 32 nt, Human
uguucuugcaacagucuucuucccagggaugg

SEQ ID NO: 531095 - RNA, 32 nt, Human
uguucuugccacugucccuacccuccaggagu

SEQ ID NO: 531096 - RNA, 32 nt, Human
uguucuugccuuggaccugcaggugugcagac

SEQ ID NO: 531097 - RNA, 32 nt, Human
uguucuugcuuuuuaauggaaaaagaaacgug

SEQ ID NO: 531098 - RNA, 32 nt, Human
uguucuuggccucugcuuuuaugucuauacaa

SEQ ID NO: 531099 - RNA, 32 nt, Human
uguucuuggguaaggaaauggaauacugaagg

SEQ ID NO: 531100 - RNA, 32 nt, Human
uguucuuggucuucaacuuucaucccugaugg

SEQ ID NO: 531101 - RNA, 32 nt, Human
uguucuuuaacuuauugagauguugcaagaaa

SEQ ID NO: 531102 - RNA, 32 nt, Human
uguucuuuacaaaggcuagcucaguccaacau

SEQ ID NO: 531103 - RNA, 32 nt, Human
uguucuuuaccucccuuuauuuggugcagaga

SEQ ID NO: 531104 - RNA, 32 nt, Human
uguucuuuagaacuguguucucaccuucccaa

SEQ ID NO: 531105 - RNA, 32 nt, Human
uguucuuuagcuguuggcuuucucugaggugu

SEQ ID NO: 531106 - RNA, 32 nt, Human
uguucuuuauguagaauugcugucuaugauug

SEQ ID NO: 531107 - RNA, 32 nt, Human
uguucuuucaacaauguugacagcaucuucac

SEQ ID NO: 531108 - RNA, 32 nt, Human
uguucuuucuagcaucucuccccacccucuga

SEQ ID NO: 531109 - RNA, 32 nt, Human
uguucuuucucaucgcucuccuugccagcuuu

SEQ ID NO: 531110 - RNA, 23 nt, Human
uguucuuugcagcagugcuucca

SEQ ID NO: 531111 - RNA, 32 nt, Human
uguucuuugcaggcaaagacuuguucaaugcg

SEQ ID NO: 531112 - RNA, 32 nt, Human
uguucuuuuauuucuuuuucucuuugauugaa

SEQ ID NO: 531113 - RNA, 32 nt, Human
uguucuuuuucugaacuccauuuuggauuuug

SEQ ID NO: 531114 - RNA, 32 nt, Human
uguugaaaaagugaaaccagcccgggagaauu

SEQ ID NO: 531115 - RNA, 32 nt, Human
uguugaaaacuauuguuucauuucuucuuuua

SEQ ID NO: 531116 - RNA, 32 nt, Human
uguugaaaauacuuuaaagaugccuagugaaa

SEQ ID NO: 531117 - RNA, 32 nt, Human
uguugaaacuuacacuguuucaucucagcuuu

SEQ ID NO: 531118 - RNA, 32 nt, Human
uguugaaagcuucacaagaccauuguuaagag

SEQ ID NO: 531119 - RNA, 32 nt, Human
uguugaacaaaauauucacaacagggcaguug

SEQ ID NO: 531120 - RNA, 32 nt, Human
uguugaacagcuuuucaagcauuuggggaguu

SEQ ID NO: 531121 - RNA, 32 nt, Human
uguugaaccauccuugcaucccagaaauaacu

SEQ ID NO: 531122 - RNA, 32 nt, Human
uguugaaccauccuugcaucccagaaauaagu

SEQ ID NO: 531123 - RNA, 32 nt, Human
uguugaaccauccuugcaugccagaaguaaau

SEQ ID NO: 531124 - RNA, 32 nt, Human
uguugaagaaauucacauucucuuauaguuug

SEQ ID NO: 531125 - RNA, 32 nt, Human
uguugaagaauagaguuaggcaccagaagaag

SEQ ID NO: 531126 - RNA, 32 nt, Human
uguugaagcaagaagacaaacuguauggugga

SEQ ID NO: 531127 - RNA, 32 nt, Human
uguugaagccuccuggaauguuugagucaagg

SEQ ID NO: 531128 - RNA, 32 nt, Human
uguugaagcugggcauuaccugggcaguggac

SEQ ID NO: 531129 - RNA, 32 nt, Human
uguugaaggagaggaacaagagugauagcaga

SEQ ID NO: 531130 - RNA, 32 nt, Human
uguugaaguagaaagugcccuggcagagcauc

SEQ ID NO: 531131 - RNA, 32 nt, Human
uguugaagugcacauguuuuucaagaguaaaa

SEQ ID NO: 531132 - RNA, 26 nt, Human
uguugaauccuucaacaaauguguca

SEQ ID NO: 531133 - RNA, 32 nt, Human
uguugaaucuggaugagggcauguggaguuca

SEQ ID NO: 531134 - RNA, 32 nt, Human
uguugaauggugagcacgugaccaugccgacc

SEQ ID NO: 531135 - RNA, 32 nt, Human
uguugaauugaucuucuauuuuucccucuggu

SEQ ID NO: 531136 - RNA, 32 nt, Human
uguugacaaauugagauuugcugauggaagaa

SEQ ID NO: 531137 - RNA, 32 nt, Human
uguugacagccuugcacuuccacaggcuacaa

SEQ ID NO: 531138 - RNA, 32 nt, Human
uguugacauuuucuccccuuccucacuuacag

SEQ ID NO: 531139 - RNA, 24 nt, Human
uguugaccaggcuggagugaagug

SEQ ID NO: 531140 - RNA, 24 nt, Human
uguugaccaggcuggagugcagug

SEQ ID NO: 531141 - RNA, 21 nt, Human
uguugaccaggcuggucucaa

SEQ ID NO: 531142 - RNA, 32 nt, Human
uguugacccauuucgugaccuaccuccgugac

SEQ ID NO: 531143 - RNA, 32 nt, Human
uguugaccccucucuccuagagaccuugaggc

SEQ ID NO: 531144 - RNA, 32 nt, Human
uguugaccgagccacaggccacggacaggggc

SEQ ID NO: 531145 - RNA, 32 nt, Human
uguugaccuaugcacgugacacugccuacggc

SEQ ID NO: 531146 - RNA, 32 nt, Human
uguugaccuggugcaagaaacaugcucuggug

SEQ ID NO: 531147 - RNA, 17 nt, Human
uguugaccuguaaggaa

SEQ ID NO: 531148 - RNA, 32 nt, Human
uguugaccuucucucaacuuguggagugacag

SEQ ID NO: 531149 - RNA, 32 nt, Human
uguugacggaagaaaaguaggaaugcagccuc

SEQ ID NO: 531150 - RNA, 32 nt, Human
uguugacucccaggugggccuggcugcccacu

SEQ ID NO: 531151 - RNA, 32 nt, Human
uguugacuccugcauuauaaaacaucuaagau

SEQ ID NO: 531152 - RNA, 32 nt, Human
uguugacucuauucugaauuuccucccuuggg

SEQ ID NO: 531153 - RNA, 32 nt, Human
uguugacucugccuugcucaaguucucaccac

SEQ ID NO: 531154 - RNA, 32 nt, Human
uguugacugcugggcccgauucugauaugagu

SEQ ID NO: 531155 - RNA, 32 nt, Human
uguugacuguccugaaaaacuugacauaccua

SEQ ID NO: 531156 - RNA, 32 nt, Human
uguugacuugaggaguuaaugugaucuuuggg

SEQ ID NO: 531157 - RNA, 32 nt, Human
uguugacuuugucccuggcaaaauuuuccacu

SEQ ID NO: 531158 - RNA, 19 nt, Human
uguugagaagaguuuggau

SEQ ID NO: 531159 - RNA, 32 nt, Human
uguugagaagucuguggagaaaugggaacgcu

SEQ ID NO: 531160 - RNA, 32 nt, Human
uguugagaccagucaugacagcauucaagauu

SEQ ID NO: 531161 - RNA, 32 nt, Human
uguugagagagaagaauggaaguuggauacac

SEQ ID NO: 531162 - RNA, 32 nt, Human
uguugagagcauuucagccagaggacuuugga

SEQ ID NO: 531163 - RNA, 18 nt, Human
uguugagagcgguguggu

SEQ ID NO: 531164 - RNA, 32 nt, Human
uguugagaggcugaggugggcagaucauuuga

SEQ ID NO: 531165 - RNA, 32 nt, Human
uguugagagggugucaaauugagaaccaggua

SEQ ID NO: 531166 - RNA, 32 nt, Human
uguugagaggucuuggugagggcucaacucaa

SEQ ID NO: 531167 - RNA, 32 nt, Human
uguugagauaaauaagugauauaaaacaugua

SEQ ID NO: 531168 - RNA, 21 nt, Human
uguugagaugcagauuccuca

SEQ ID NO: 531169 - RNA, 32 nt, Human
uguugagauuucuguguucuccacucuuccac

SEQ ID NO: 531170 - RNA, 32 nt, Human
uguugagcagggcgugguucuccagucugccc

SEQ ID NO: 531171 - RNA, 32 nt, Human
uguugagcauggucaguuuagccugcgaggcu

SEQ ID NO: 531172 - RNA, 32 nt, Human
uguugagccacccaucagacccucuuuagcug

SEQ ID NO: 531173 - RNA, 32 nt, Human
uguugagccaggagguugggcaaaggccggau

SEQ ID NO: 531174 - RNA, 32 nt, Human
uguugaggaaggagggaguagauggagggcuc

SEQ ID NO: 531175 - RNA, 32 nt, Human
uguugagggaaaagaauggugggcugggggcg

SEQ ID NO: 531176 - RNA, 32 nt, Human
uguugagggagagagacagaauccuggacucu

SEQ ID NO: 531177 - RNA, 32 nt, Human
uguugagggagggagagcagguuacuuggcaa

SEQ ID NO: 531178 - RNA, 32 nt, Human
uguugagggccgacugcugcucugccuuccuu

SEQ ID NO: 531179 - RNA, 32 nt, Human
uguugagucuagaauugcuguguuguucuuag

SEQ ID NO: 531180 - RNA, 32 nt, Human
uguugagucuccugccugcuugccaaaagcua

SEQ ID NO: 531181 - RNA, 32 nt, Human
uguugaguguguggauucccuuuuaagauaga

SEQ ID NO: 531182 - RNA, 32 nt, Human
uguugaguucugugccuggccuacagauuaac

SEQ ID NO: 531183 - RNA, 20 nt, Human
uguugaguuugugcuguggu

SEQ ID NO: 531184 - RNA, 32 nt, Human
uguugauacauuuugaaucuuuagacacuuac

SEQ ID NO: 531185 - RNA, 32 nt, Human
uguugauagagugcaucagaauuucaaaaggc

SEQ ID NO: 531186 - RNA, 32 nt, Human
uguugauaguagaagcagugguaguuguugua

SEQ ID NO: 531187 - RNA, 32 nt, Human
uguugaugaaguauacuuuuccccuguuaaac

SEQ ID NO: 531188 - RNA, 31 nt, Human
uguugaugacuucucuguuccacaggcccuc

SEQ ID NO: 531189 - RNA, 32 nt, Human
uguugaugagccacuguaccccgauaccacug

SEQ ID NO: 531190 - RNA, 32 nt, Human
uguugaugagcuauugagagcugcaguaguuu

SEQ ID NO: 531191 - RNA, 24 nt, Human
uguugaugaggcuggagugcagug

SEQ ID NO: 531192 - RNA, 32 nt, Human
uguugaugaugcccuggaaagacagagcccug

SEQ ID NO: 531193 - RNA, 32 nt, Human
uguugaugcccuuucugacuguguucucuguu

SEQ ID NO: 531194 - RNA, 22 nt, Human
uguugauggggaucccagcaga

SEQ ID NO: 531195 - RNA, 32 nt, Human
uguugauguguucugugucugucugucaccug

SEQ ID NO: 531196 - RNA, 32 nt, Human
uguugauguuaacugagcuacuagagauauuc

SEQ ID NO: 531197 - RNA, 32 nt, Human
uguugauuaaaacauuauagauuuucauguuc

SEQ ID NO: 531198 - RNA, 32 nt, Human
uguugauuaccucuugguuugacuucccaggg

SEQ ID NO: 531199 - RNA, 32 nt, Human
uguugauuccacugaaaccucuguucucauga

SEQ ID NO: 531200 - RNA, 32 nt, Human
uguugauuugacuuccccuuggaaaugaguau

SEQ ID NO: 531201 - RNA, 32 nt, Human
uguugauuuggcugagcagagcugaguuuugg

SEQ ID NO: 531202 - RNA, 32 nt, Human
uguugauuuucacugcaacucugccuuugugu

SEQ ID NO: 531203 - RNA, 32 nt, Human
uguugauuuuucuauuuauauuuccuuguaca

SEQ ID NO: 531204 - RNA, 32 nt, Human
uguugcaaauuccaccccuccuucccuggucc

SEQ ID NO: 531205 - RNA, 32 nt, Human
uguugcaacgucagaguaaaagaaggacccug

SEQ ID NO: 531206 - RNA, 32 nt, Human
uguugcaaucagggcucacugcagccucgacc

SEQ ID NO: 531207 - RNA, 32 nt, Human
uguugcacaauuucuggucaaucaaugcugac

SEQ ID NO: 531208 - RNA, 32 nt, Human
uguugcacacauaucacaucguuuaaauugca

SEQ ID NO: 531209 - RNA, 32 nt, Human
uguugcaccagaaagguccccacuagagcuaa

SEQ ID NO: 531210 - RNA, 32 nt, Human
uguugcacuagcuugggguagaugcugggggc

SEQ ID NO: 531211 - RNA, 32 nt, Human
uguugcacugaggauuuagggagagagcaaga

SEQ ID NO: 531212 - RNA, 32 nt, Human
uguugcagagccaguaaccccaguguuaucug

SEQ ID NO: 531213 - RNA, 32 nt, Human
uguugcagauuugccauuucuccauaauaugg

SEQ ID NO: 531214 - RNA, 32 nt, Human
uguugcagccagggggcuggauuucccggcug

SEQ ID NO: 531215 - RNA, 32 nt, Human
uguugcagccugguugagaaggagagaaaaag

SEQ ID NO: 531216 - RNA, 32 nt, Human
uguugcagcuaccugcacuucuagaugcuccc

SEQ ID NO: 531217 - RNA, 32 nt, Human
uguugcagcuaccugcacuucuagauucaucu

SEQ ID NO: 531218 - RNA, 32 nt, Human
uguugcagcugcaaggagaccaugccuguggg

SEQ ID NO: 531219 - RNA, 32 nt, Human
uguugcaggacuagcagguggauaguauauag

SEQ ID NO: 531220 - RNA, 32 nt, Human
uguugcaggagggagagggagagcuucuuuag

SEQ ID NO: 531221 - RNA, 32 nt, Human
uguugcaggcacuccagccuggcgacagagcg

SEQ ID NO: 531222 - RNA, 24 nt, Human
uguugcaggggcuggugugcagug

SEQ ID NO: 531223 - RNA, 32 nt, Human
uguugcagguguccaccauugcgaugcagcag

SEQ ID NO: 531224 - RNA, 32 nt, Human
uguugcaguacccccauucacccacaaaaugc

SEQ ID NO: 531225 - RNA, 32 nt, Human
uguugcagugugccucugccccaugggcccga

SEQ ID NO: 531226 - RNA, 32 nt, Human
uguugcauacaguucugcuguaaacuuucuug

SEQ ID NO: 531227 - RNA, 32 nt, Human
uguugcauauaccuuaaucuuugauaugaaua

SEQ ID NO: 531228 - RNA, 32 nt, Human
uguugcaucccccuuagaauguuucuauuucc

SEQ ID NO: 531229 - RNA, 32 nt, Human
uguugcauuccaggaacuagcccaggcccugg

SEQ ID NO: 531230 - RNA, 32 nt, Human
uguugcauucccagcacacaguacaguuauuc

SEQ ID NO: 531231 - RNA, 32 nt, Human
uguugcauuucuuuuaugaugacuguaguuga

SEQ ID NO: 531232 - RNA, 32 nt, Human
uguugccaaaggacacauucccagaugggauu

SEQ ID NO: 531233 - RNA, 24 nt, Human
uguugccaaggcuggaaugcagug

SEQ ID NO: 531234 - RNA, 24 nt, Human
uguugccaaggcuggagugcagug

SEQ ID NO: 531235 - RNA, 32 nt, Human
uguugccacccaggugauguuaguguuuuaag

SEQ ID NO: 531236 - RNA, 32 nt, Human
uguugccacugcacucuggccugggcaacaga

SEQ ID NO: 531237 - RNA, 32 nt, Human
uguugccagaaucagacugcccuagaacagaa

SEQ ID NO: 531238 - RNA, 23 nt, Human
uguugccagacuggagugcagug

SEQ ID NO: 531239 - RNA, 32 nt, Human
uguugccagccauguugcccaggcuggucgug

SEQ ID NO: 531240 - RNA, 23 nt, Human
uguugccaggccagagugcagug

SEQ ID NO: 531241 - RNA, 23 nt, Human
uguugccaggcuagagugcagug

SEQ ID NO: 531242 - RNA, 23 nt, Human
uguugccaggcuggaaugcagug

SEQ ID NO: 531243 - RNA, 23 nt, Human
uguugccaggcuggaaugccgug

SEQ ID NO: 531244 - RNA, 23 nt, Human
uguugccaggcuggagggcagug

SEQ ID NO: 531245 - RNA, 22 nt, Human
uguugccaggcuggagugcagu

SEQ ID NO: 531246 - RNA, 23 nt, Human
uguugccaggcuggagugcagug

SEQ ID NO: 531247 - RNA, 23 nt, Human
uguugccaggcuggggugcagug

SEQ ID NO: 531248 - RNA, 32 nt, Human
uguugccauaaauauguaagugucaauaccaa

SEQ ID NO: 531249 - RNA, 32 nt, Human
uguugccaucagggugcacacagcaggugcag

SEQ ID NO: 531250 - RNA, 32 nt, Human
uguugccaugcuguggaagcucugccuuuuug

SEQ ID NO: 531251 - RNA, 32 nt, Human
uguugccauugacagcguugugaauggucauc

SEQ ID NO: 531252 - RNA, 32 nt, Human
uguugccauuuuaccccagcaguuccuuuucu

SEQ ID NO: 531253 - RNA, 24 nt, Human
uguugcccaaauucagugucagug

SEQ ID NO: 531254 - RNA, 24 nt, Human
uguugcccaaccuggagugcagug

SEQ ID NO: 531255 - RNA, 23 nt, Human
uguugcccaagcuggaaugcagu

SEQ ID NO: 531256 - RNA, 24 nt, Human
uguugcccaagcuggaaugcagug

SEQ ID NO: 531257 - RNA, 23 nt, Human
uguugcccaagcuggaguacagu

SEQ ID NO: 531258 - RNA, 24 nt, Human
uguugcccaagcuggagugaagug

SEQ ID NO: 531259 - RNA, 24 nt, Human
uguugcccaagcuggagugcaaug

SEQ ID NO: 531260 - RNA, 23 nt, Human
uguugcccaagcuggagugcagu

SEQ ID NO: 531261 - RNA, 24 nt, Human
uguugcccaagcuggagugcagug

SEQ ID NO: 531262 - RNA, 20 nt, Human
uguugcccaagcugguguca

SEQ ID NO: 531263 - RNA, 21 nt, Human
uguugcccaagcuggugucaa

SEQ ID NO: 531264 - RNA, 24 nt, Human
uguugcccaagcuugagggcagug

SEQ ID NO: 531265 - RNA, 24 nt, Human
uguugcccaagguagagugcagug

SEQ ID NO: 531266 - RNA, 19 nt, Human
uguugcccaaggugugcag

SEQ ID NO: 531267 - RNA, 21 nt, Human
uguugcccaaguuggagugca

SEQ ID NO: 531268 - RNA, 23 nt, Human
uguugcccaaguuggagugcaau

SEQ ID NO: 531269 - RNA, 32 nt, Human
uguugcccaaguuggagugcaaucuuggcuca

SEQ ID NO: 531270 - RNA, 24 nt, Human
uguugcccaaguuggagugcagug

SEQ ID NO: 531271 - RNA, 32 nt, Human
uguugcccaaugagccuucuuucugcccucca

SEQ ID NO: 531272 - RNA, 24 nt, Human
uguugcccacauuggagugcagug

SEQ ID NO: 531273 - RNA, 24 nt, Human
uguugcccacgcaggagugcagug

SEQ ID NO: 531274 - RNA, 24 nt, Human
uguugcccacgcuggagugcaaug

SEQ ID NO: 531275 - RNA, 21 nt, Human
uguugcccagacuagaguaca

SEQ ID NO: 531276 - RNA, 23 nt, Human
uguugcccagacuagaguacaau

SEQ ID NO: 531277 - RNA, 23 nt, Human
uguugcccagacuagagugcagu

SEQ ID NO: 531278 - RNA, 24 nt, Human
uguugcccagacuagagugcagug

SEQ ID NO: 531279 - RNA, 23 nt, Human
uguugcccagacuggagggcagu

SEQ ID NO: 531280 - RNA, 24 nt, Human
uguugcccagacuggagggcagug

SEQ ID NO: 531281 - RNA, 24 nt, Human
uguugcccagacuggagugcaaug

SEQ ID NO: 531282 - RNA, 23 nt, Human
uguugcccagacuggagugcagu

SEQ ID NO: 531283 - RNA, 24 nt, Human
uguugcccagacuggagugcagug

SEQ ID NO: 531284 - RNA, 22 nt, Human
uguugcccagaggaugugcagu

SEQ ID NO: 531285 - RNA, 21 nt, Human
uguugcccagccuggagugca

SEQ ID NO: 531286 - RNA, 23 nt, Human
uguugcccagccuggagugcaau

SEQ ID NO: 531287 - RNA, 32 nt, Human
uguugcccagccuggccaacauggugaaaccc

SEQ ID NO: 531288 - RNA, 18 nt, Human
uguugcccagcuggacag

SEQ ID NO: 531289 - RNA, 23 nt, Human
uguugcccagcuggagugcagug

SEQ ID NO: 531290 - RNA, 24 nt, Human
uguugcccaggagggagugcagug

SEQ ID NO: 531291 - RNA, 24 nt, Human
uguugcccaggauggagugcagug

SEQ ID NO: 531292 - RNA, 24 nt, Human
uguugcccaggcaagagugcagug

SEQ ID NO: 531293 - RNA, 24 nt, Human
uguugcccaggcaggaguacagug

SEQ ID NO: 531294 - RNA, 24 nt, Human
uguugcccaggcaguagugcagug

SEQ ID NO: 531295 - RNA, 23 nt, Human
uguugcccaggcggaguacaaug

SEQ ID NO: 531296 - RNA, 22 nt, Human
uguugcccaggcuagagcgcag

SEQ ID NO: 531297 - RNA, 21 nt, Human
uguugcccaggcuagagugca

SEQ ID NO: 531298 - RNA, 24 nt, Human
uguugcccaggcuagagugcaaug

SEQ ID NO: 531299 - RNA, 24 nt, Human
uguugcccaggcuagagugcacug

SEQ ID NO: 531300 - RNA, 22 nt, Human
uguugcccaggcuagagugcag

SEQ ID NO: 531301 - RNA, 23 nt, Human
uguugcccaggcuagagugcagu

SEQ ID NO: 531302 - RNA, 24 nt, Human
uguugcccaggcuagagugcagug

SEQ ID NO: 531303 - RNA, 24 nt, Human
uguugcccaggcuagcaugcaaug

SEQ ID NO: 531304 - RNA, 20 nt, Human
uguugcccaggcuagucugg

SEQ ID NO: 531305 - RNA, 19 nt, Human
uguugcccaggcugaagug

SEQ ID NO: 531306 - RNA, 20 nt, Human
uguugcccaggcugaagugc

SEQ ID NO: 531307 - RNA, 24 nt, Human
uguugcccaggcugaagugcaaug

SEQ ID NO: 531308 - RNA, 23 nt, Human
uguugcccaggcugaagugcagu

SEQ ID NO: 531309 - RNA, 24 nt, Human
uguugcccaggcugaagugcagug

SEQ ID NO: 531310 - RNA, 24 nt, Human
uguugcccaggcugaagugccaug

SEQ ID NO: 531311 - RNA, 24 nt, Human
uguugcccaggcugaaguguagug

SEQ ID NO: 531312 - RNA, 21 nt, Human
uguugcccaggcugaauucag

SEQ ID NO: 531313 - RNA, 24 nt, Human
uguugcccaggcugcagugcagug

SEQ ID NO: 531314 - RNA, 21 nt, Human
uguugcccaggcugcucucag

SEQ ID NO: 531315 - RNA, 22 nt, Human
uguugcccaggcugcuggagug

SEQ ID NO: 531316 - RNA, 23 nt, Human
uguugcccaggcugcuggagugc

SEQ ID NO: 531317 - RNA, 27 nt, Human
uguugcccaggcugcuggagugccgug

SEQ ID NO: 531318 - RNA, 22 nt, Human
uguugcccaggcuggaaauggc

SEQ ID NO: 531319 - RNA, 20 nt, Human
uguugcccaggcuggaagug

SEQ ID NO: 531320 - RNA, 21 nt, Human
uguugcccaggcuggaagugu

SEQ ID NO: 531321 - RNA, 23 nt, Human
uguugcccaggcuggaauacagu

SEQ ID NO: 531322 - RNA, 24 nt, Human
uguugcccaggcuggaauacagug

SEQ ID NO: 531323 - RNA, 24 nt, Human
uguugcccaggcuggaaugcaaug

SEQ ID NO: 531324 - RNA, 23 nt, Human
uguugcccaggcuggaaugcagu

SEQ ID NO: 531325 - RNA, 24 nt, Human
uguugcccaggcuggaaugcagug

SEQ ID NO: 531326 - RNA, 24 nt, Human
uguugcccaggcuggacugcagug

SEQ ID NO: 531327 - RNA, 24 nt, Human
uguugcccaggcuggagagcagug

SEQ ID NO: 531328 - RNA, 23 nt, Human
uguugcccaggcuggagcgcagu

SEQ ID NO: 531329 - RNA, 24 nt, Human
uguugcccaggcuggagcgcagug

SEQ ID NO: 531330 - RNA, 24 nt, Human
uguugcccaggcuggagggcaaug

SEQ ID NO: 531331 - RNA, 24 nt, Human
uguugcccaggcuggagggcagug

SEQ ID NO: 531332 - RNA, 21 nt, Human
uguugcccaggcuggaguaca

SEQ ID NO: 531333 - RNA, 23 nt, Human
uguugcccaggcuggaguacaau

SEQ ID NO: 531334 - RNA, 24 nt, Human
uguugcccaggcuggaguacaaug

SEQ ID NO: 531335 - RNA, 23 nt, Human
uguugcccaggcuggaguacagu

SEQ ID NO: 531336 - RNA, 24 nt, Human
uguugcccaggcuggaguacagug

SEQ ID NO: 531337 - RNA, 24 nt, Human
uguugcccaggcuggaguacauug

SEQ ID NO: 531338 - RNA, 23 nt, Human
uguugcccaggcuggaguauagu

SEQ ID NO: 531339 - RNA, 27 nt, Human
uguugcccaggcuggaguauaguagug

SEQ ID NO: 531340 - RNA, 19 nt, Human
uguugcccaggcuggagug

SEQ ID NO: 531341 - RNA, 24 nt, Human
uguugcccaggcuggagugaagug

SEQ ID NO: 531342 - RNA, 20 nt, Human
uguugcccaggcuggagugc

SEQ ID NO: 531343 - RNA, 21 nt, Human
uguugcccaggcuggagugca

SEQ ID NO: 531344 - RNA, 22 nt, Human
uguugcccaggcuggagugcaa

SEQ ID NO: 531345 - RNA, 27 nt, Human
uguugcccaggcuggagugcaacggug

SEQ ID NO: 531346 - RNA, 23 nt, Human
uguugcccaggcuggagugcaau

SEQ ID NO: 531347 - RNA, 24 nt, Human
uguugcccaggcuggagugcaaug

SEQ ID NO: 531348 - RNA, 22 nt, Human
uguugcccaggcuggagugcag

SEQ ID NO: 531349 - RNA, 23 nt, Human
uguugcccaggcuggagugcagu

SEQ ID NO: 531350 - RNA, 24 nt, Human
uguugcccaggcuggagugcagug

SEQ ID NO: 531351 - RNA, 24 nt, Human
uguugcccaggcuggagugcauug

SEQ ID NO: 531352 - RNA, 24 nt, Human
uguugcccaggcuggagugccuug

SEQ ID NO: 531353 - RNA, 24 nt, Human
uguugcccaggcuggagugcgaug

SEQ ID NO: 531354 - RNA, 23 nt, Human
uguugcccaggcuggagugcggu

SEQ ID NO: 531355 - RNA, 24 nt, Human
uguugcccaggcuggagugcggug

SEQ ID NO: 531356 - RNA, 23 nt, Human
uguugcccaggcuggaguggagu

SEQ ID NO: 531357 - RNA, 24 nt, Human
uguugcccaggcuggaguggagug

SEQ ID NO: 531358 - RNA, 22 nt, Human
uguugcccaggcuggaguguag

SEQ ID NO: 531359 - RNA, 23 nt, Human
uguugcccaggcuggaguguagu

SEQ ID NO: 531360 - RNA, 24 nt, Human
uguugcccaggcuggaguguagug

SEQ ID NO: 531361 - RNA, 21 nt, Human
uguugcccaggcuggagugug

SEQ ID NO: 531362 - RNA, 24 nt, Human
uguugcccaggcuggagugugaug

SEQ ID NO: 531363 - RNA, 24 nt, Human
uguugcccaggcuggaguguggug

SEQ ID NO: 531364 - RNA, 24 nt, Human
uguugcccaggcuggcgugcagug

SEQ ID NO: 531365 - RNA, 22 nt, Human
uguugcccaggcugggagggca

SEQ ID NO: 531366 - RNA, 24 nt, Human
uguugcccaggcugggagggcaau

SEQ ID NO: 531367 - RNA, 32 nt, Human
uguugcccaggcugggagggcaauggcaccgu

SEQ ID NO: 531368 - RNA, 23 nt, Human
uguugcccaggcuggggugcagu

SEQ ID NO: 531369 - RNA, 24 nt, Human
uguugcccaggcuggggugcagug

SEQ ID NO: 531370 - RNA, 21 nt, Human
uguugcccaggcuggucgcga

SEQ ID NO: 531371 - RNA, 20 nt, Human
uguugcccaggcuggucgug

SEQ ID NO: 531372 - RNA, 21 nt, Human
uguugcccaggcuggucucaa

SEQ ID NO: 531373 - RNA, 23 nt, Human
uguugcccaggcuggucucaagu

SEQ ID NO: 531374 - RNA, 22 nt, Human
uguugcccaggcuggucucaau

SEQ ID NO: 531375 - RNA, 21 nt, Human
uguugcccaggcuggucucag

SEQ ID NO: 531376 - RNA, 22 nt, Human
uguugcccaggcuggucuccaa

SEQ ID NO: 531377 - RNA, 23 nt, Human
uguugcccaggcuggucuccaau

SEQ ID NO: 531378 - RNA, 21 nt, Human
uguugcccaggcuggucucgg

SEQ ID NO: 531379 - RNA, 22 nt, Human
uguugcccaggcuggucugaag

SEQ ID NO: 531380 - RNA, 21 nt, Human
uguugcccaggcuggucuggu

SEQ ID NO: 531381 - RNA, 22 nt, Human
uguugcccaggcuggucuuaag

SEQ ID NO: 531382 - RNA, 22 nt, Human
uguugcccaggcuggucuugag

SEQ ID NO: 531383 - RNA, 20 nt, Human
uguugcccaggcugguguca

SEQ ID NO: 531384 - RNA, 21 nt, Human
uguugcccaggcuggugucaa

SEQ ID NO: 531385 - RNA, 20 nt, Human
uguugcccaggcuggugucg

SEQ ID NO: 531386 - RNA, 21 nt, Human
uguugcccaggcuggugucga

SEQ ID NO: 531387 - RNA, 24 nt, Human
uguugcccaggcuggugugcaaug

SEQ ID NO: 531388 - RNA, 32 nt, Human
uguugcccaggcugguugcaaacuucuggccu

SEQ ID NO: 531389 - RNA, 21 nt, Human
uguugcccaggcugguuucaa

SEQ ID NO: 531390 - RNA, 24 nt, Human
uguugcccaggcuguaguacaaug

SEQ ID NO: 531391 - RNA, 24 nt, Human
uguugcccaggcuguagugcagug

SEQ ID NO: 531392 - RNA, 24 nt, Human
uguugcccaggcuugagugcagug

SEQ ID NO: 531393 - RNA, 25 nt, Human
uguugcccagggcuggagugcagug

SEQ ID NO: 531394 - RNA, 32 nt, Human
uguugcccagggcuggagugcaguggcaugau

SEQ ID NO: 531395 - RNA, 24 nt, Human
uguugcccaggguggagugcagug

SEQ ID NO: 531396 - RNA, 21 nt, Human
uguugcccaggguggucucaa

SEQ ID NO: 531397 - RNA, 22 nt, Human
uguugcccaggguggucuguaa

SEQ ID NO: 531398 - RNA, 19 nt, Human
uguugcccagguccugcaa

SEQ ID NO: 531399 - RNA, 24 nt, Human
uguugcccagguuagagugcagug

SEQ ID NO: 531400 - RNA, 26 nt, Human
uguugcccagguucuagagugcagug

SEQ ID NO: 531401 - RNA, 24 nt, Human
uguugcccagguuggagugcagug

SEQ ID NO: 531402 - RNA, 21 nt, Human
uguugcccagguuggagugua

SEQ ID NO: 531403 - RNA, 23 nt, Human
uguugcccagguuggaguguaau

SEQ ID NO: 531404 - RNA, 22 nt, Human
uguugcccagucuggaguacag

SEQ ID NO: 531405 - RNA, 24 nt, Human
uguugcccagucuggaguucagug

SEQ ID NO: 531406 - RNA, 24 nt, Human
uguugcccaugcuggagggcagug

SEQ ID NO: 531407 - RNA, 24 nt, Human
uguugcccaugcuggagugcaaug

SEQ ID NO: 531408 - RNA, 24 nt, Human
uguugcccaugcuggagugcauug

SEQ ID NO: 531409 - RNA, 24 nt, Human
uguugcccauucuggagugcagug

SEQ ID NO: 531410 - RNA, 32 nt, Human
uguugccccacacagccuccugcugcaggugc

SEQ ID NO: 531411 - RNA, 24 nt, Human
uguugccccagcuugagugcagug

SEQ ID NO: 531412 - RNA, 25 nt, Human
uguugccccaggcuggagugcagug

SEQ ID NO: 531413 - RNA, 32 nt, Human
uguugccccaggcuggagugcaguggcgugau

SEQ ID NO: 531414 - RNA, 32 nt, Human
uguugccccaggcuggagugcaguggugugau

SEQ ID NO: 531415 - RNA, 32 nt, Human
uguugccccugccucuccuccuuucucucucc

SEQ ID NO: 531416 - RNA, 32 nt, Human
uguugccccuugugggcaaccaugaggggcau

SEQ ID NO: 531417 - RNA, 24 nt, Human
uguugcccgggcuggaaugcaaug

SEQ ID NO: 531418 - RNA, 24 nt, Human
uguugcccgggcuggagugcaaug

SEQ ID NO: 531419 - RNA, 22 nt, Human
uguugcccgggcuggagugcag

SEQ ID NO: 531420 - RNA, 23 nt, Human
uguugcccucacuagagugcagu

SEQ ID NO: 531421 - RNA, 32 nt, Human
uguugcccuccaggggccuggcacagcuggcc

SEQ ID NO: 531422 - RNA, 32 nt, Human
uguugcccugacagugcauggaaaggacguug

SEQ ID NO: 531423 - RNA, 24 nt, Human
uguugcccugacuggaguucagug

SEQ ID NO: 531424 - RNA, 24 nt, Human
uguugcccuggcuggacugcagug

SEQ ID NO: 531425 - RNA, 24 nt, Human
uguugcccuggcuggaguucagug

SEQ ID NO: 531426 - RNA, 20 nt, Human
uguugcccuuaaguacagug

SEQ ID NO: 531427 - RNA, 32 nt, Human
uguugcccuugugcuccagucauugcacaagg

SEQ ID NO: 531428 - RNA, 32 nt, Human
uguugcccuuuggagcuuggugaggagggugg

SEQ ID NO: 531429 - RNA, 32 nt, Human
uguugccgacacgcccucccaacugcagacau

SEQ ID NO: 531430 - RNA, 24 nt, Human
uguugccgaggcuggagugcaaug

SEQ ID NO: 531431 - RNA, 32 nt, Human
uguugccgguucauggauuacuucucuauaaa

SEQ ID NO: 531432 - RNA, 32 nt, Human
uguugccguccacuguggcggguuucuuccug

SEQ ID NO: 531433 - RNA, 24 nt, Human
uguugccuaggccagagugcagug

SEQ ID NO: 531434 - RNA, 23 nt, Human
uguugccuaggcggaguacagug

SEQ ID NO: 531435 - RNA, 24 nt, Human
uguugccuaggcuggaguacagug

SEQ ID NO: 531436 - RNA, 24 nt, Human
uguugccuaggcuggagugaagug

SEQ ID NO: 531437 - RNA, 24 nt, Human
uguugccuaggcuggagugcaaug

SEQ ID NO: 531438 - RNA, 24 nt, Human
uguugccuaggcuggagugcagug

SEQ ID NO: 531439 - RNA, 32 nt, Human
uguugccucacugcggccucccgaguccaaag

SEQ ID NO: 531440 - RNA, 32 nt, Human
uguugccucgucggaguuugcuggugaugaca

SEQ ID NO: 531441 - RNA, 24 nt, Human
uguugccugggcuggaaugcagug

SEQ ID NO: 531442 - RNA, 32 nt, Human
uguugccugggcuggagaacaguggcaccauc

SEQ ID NO: 531443 - RNA, 24 nt, Human
uguugccugggcuggagugcagug

SEQ ID NO: 531444 - RNA, 32 nt, Human
uguugccugggcugguugcaaacucuugagcu

SEQ ID NO: 531445 - RNA, 32 nt, Human
uguugccuggggaacaggagagcugcugcagg

SEQ ID NO: 531446 - RNA, 32 nt, Human
uguugccugugaggagcuuucuggcaugugau

SEQ ID NO: 531447 - RNA, 32 nt, Human
uguugccugugaguucugccucgcuggccaga

SEQ ID NO: 531448 - RNA, 32 nt, Human
uguugccuguguagagcaaguuacggugguac

SEQ ID NO: 531449 - RNA, 32 nt, Human
uguugccuguucucaaauaucuguuccaacca

SEQ ID NO: 531450 - RNA, 32 nt, Human
uguugccuucauuccugagcagguaucauccu

SEQ ID NO: 531451 - RNA, 32 nt, Human
uguugccuuccaggggccaagagcugcucuga

SEQ ID NO: 531452 - RNA, 32 nt, Human
uguugccuuuccaagugaccucuccucuucuu

SEQ ID NO: 531453 - RNA, 32 nt, Human
uguugccuuugguuagggaacacagagugcuu

SEQ ID NO: 531454 - RNA, 32 nt, Human
uguugcgacgcgggcuucuggagcuugucacc

SEQ ID NO: 531455 - RNA, 32 nt, Human
uguugcgaggaaccugggcucugacucgaaca

SEQ ID NO: 531456 - RNA, 32 nt, Human
uguugcgcaucuccuccacguuuuccuggagu

SEQ ID NO: 531457 - RNA, 32 nt, Human
uguugcgugccuguagucccagcuacuuggga

SEQ ID NO: 531458 - RNA, 22 nt, Human
uguugcuacuaaaaauacaaaa

SEQ ID NO: 531459 - RNA, 32 nt, Human
uguugcuacuaaaaauacaaaaauuggcuggg

SEQ ID NO: 531460 - RNA, 23 nt, Human
uguugcuaggcuggagugcagug

SEQ ID NO: 531461 - RNA, 32 nt, Human
uguugcuaucauccuccuuucucuuauugcca

SEQ ID NO: 531462 - RNA, 24 nt, Human
uguugcucaagcuggaguggagug

SEQ ID NO: 531463 - RNA, 32 nt, Human
uguugcucagagugaagagugaagagcauuug

SEQ ID NO: 531464 - RNA, 24 nt, Human
uguugcucaggcuggaguacagug

SEQ ID NO: 531465 - RNA, 24 nt, Human
uguugcucaggcuggauugcagug

SEQ ID NO: 531466 - RNA, 32 nt, Human
uguugcucauucucucacguuauuucauucuu

SEQ ID NO: 531467 - RNA, 32 nt, Human
uguugcuccaguauuaaccucuguggguggcc

SEQ ID NO: 531468 - RNA, 32 nt, Human
uguugcucggcccagguuggggagaggacgga

SEQ ID NO: 531469 - RNA, 32 nt, Human
uguugcucuaauucugugccucugugcauuaa

SEQ ID NO: 531470 - RNA, 32 nt, Human
uguugcucuggcuuccuuucauugucuuaggc

SEQ ID NO: 531471 - RNA, 24 nt, Human
uguugcugaggcuggagugcagug

SEQ ID NO: 531472 - RNA, 32 nt, Human
uguugcugaggcuggagugcagugaugugauc

SEQ ID NO: 531473 - RNA, 32 nt, Human
uguugcugauucaagaaacagaaguagaagag

SEQ ID NO: 531474 - RNA, 32 nt, Human
uguugcugcacuccagccugagugacagagug

SEQ ID NO: 531475 - RNA, 32 nt, Human
uguugcugcaucuccccucagauuccaccuag

SEQ ID NO: 531476 - RNA, 32 nt, Human
uguugcugcccaacuucaacauucauaauggc

SEQ ID NO: 531477 - RNA, 32 nt, Human
uguugcugcccaggcucuagaucacauggcau

SEQ ID NO: 531478 - RNA, 31 nt, Human
uguugcugccucucugugcuuuuggccucug

SEQ ID NO: 531479 - RNA, 32 nt, Human
uguugcugcgcacaccuguacucuccaaugaa

SEQ ID NO: 531480 - RNA, 32 nt, Human
uguugcugcuguaugcguuccauugugggaca

SEQ ID NO: 531481 - RNA, 32 nt, Human
uguugcuggcuggucuugaacuucugggguca

SEQ ID NO: 531482 - RNA, 32 nt, Human
uguugcuguagacugcugcgcaguccugggug

SEQ ID NO: 531483 - RNA, 32 nt, Human
uguugcuguauuggacagcacagguauagaac

SEQ ID NO: 531484 - RNA, 32 nt, Human
uguugcugugguggagugaugcagugggcacu

SEQ ID NO: 531485 - RNA, 32 nt, Human
uguugcuguugcccuguuuccugcugcuuugu

SEQ ID NO: 531486 - RNA, 32 nt, Human
uguugcuucccuccucccauuuucuugucugu

SEQ ID NO: 531487 - RNA, 32 nt, Human
uguugcuuccuucacagcaugucucaccaucu

SEQ ID NO: 531488 - RNA, 23 nt, Human
uguugcuucucucuuacuagaca

SEQ ID NO: 531489 - RNA, 32 nt, Human
uguugcuucuuugccuguuccugcuuucucuu

SEQ ID NO: 531490 - RNA, 32 nt, Human
uguugcuugacuccuuccauccuuccugaccu

SEQ ID NO: 531491 - RNA, 32 nt, Human
uguugcuugacuucgggggcacugugagccua

SEQ ID NO: 531492 - RNA, 32 nt, Human
uguugcuugcacuccagccugggugacagagu

SEQ ID NO: 531493 - RNA, 32 nt, Human
uguugcuuggaaggcauccauagcugcauuuu

SEQ ID NO: 531494 - RNA, 32 nt, Human
uguugcuugggcuccugggagcugcaguugga

SEQ ID NO: 531495 - RNA, 24 nt, Human
uguugcuugggcugcaaugcagug

SEQ ID NO: 531496 - RNA, 32 nt, Human
uguugcuuuaucucccccucccugcauguguc

SEQ ID NO: 531497 - RNA, 32 nt, Human
uguugcuuucagacugaguugcaugucacucu

SEQ ID NO: 531498 - RNA, 32 nt, Human
uguugcuuuccagagguguguggcucuuaagu

SEQ ID NO: 531499 - RNA, 32 nt, Human
uguugcuuucucguguaguuguucacaguagu

SEQ ID NO: 531500 - RNA, 32 nt, Human
uguugcuuugcugccagauguucaucugcuug

SEQ ID NO: 531501 - RNA, 32 nt, Human
uguuggaacuucugaccugucagaaagauuuu

SEQ ID NO: 531502 - RNA, 32 nt, Human
uguuggaagaaccaaugaaacacacacuuacu

SEQ ID NO: 531503 - RNA, 32 nt, Human
uguuggaagaauuccuugauuggaaauuguac

SEQ ID NO: 531504 - RNA, 32 nt, Human
uguuggaagaggaggcaggggaggguggccag

SEQ ID NO: 531505 - RNA, 20 nt, Human
uguuggaagauguaggugag

SEQ ID NO: 531506 - RNA, 32 nt, Human
uguuggaauggaacccuugcuauaguagugac

SEQ ID NO: 531507 - RNA, 23 nt, Human
uguuggacaaaccgagugcaaug

SEQ ID NO: 531508 - RNA, 32 nt, Human
uguuggaccuuaagcaaaucacuuuccugauc

SEQ ID NO: 531509 - RNA, 32 nt, Human
uguuggacguggagcggcgccgccaccgcgcc

SEQ ID NO: 531510 - RNA, 21 nt, Human
uguuggagaccaggaacaauc

SEQ ID NO: 531511 - RNA, 32 nt, Human
uguuggagagagaagggcuuagguagcaggga

SEQ ID NO: 531512 - RNA, 32 nt, Human
uguuggagagagaccugugcuuauuggaugga

SEQ ID NO: 531513 - RNA, 32 nt, Human
uguuggagagggcuuucagcuccccuccuccc

SEQ ID NO: 531514 - RNA, 32 nt, Human
uguuggagauccuucaggcaguaagggagagu

SEQ ID NO: 531515 - RNA, 23 nt, Human
uguuggagcaggcaggcaaaggg

SEQ ID NO: 531516 - RNA, 21 nt, Human
uguuggagcucagggaaggga

SEQ ID NO: 531517 - RNA, 32 nt, Human
uguuggagcugcagagagaccccaaagguagu

SEQ ID NO: 531518 - RNA, 32 nt, Human
uguuggaggaagacgcggucaugagggcugaa

SEQ ID NO: 531519 - RNA, 31 nt, Human
uguuggagggaaccuguuucacuauggccuc

SEQ ID NO: 531520 - RNA, 32 nt, Human
uguuggagggagaagcuggagacuuccagcuc

SEQ ID NO: 531521 - RNA, 32 nt, Human
uguuggagggcacuuagugggguugaaguaug

SEQ ID NO: 531522 - RNA, 32 nt, Human
uguuggagggggcagcugaaggagaacagcaa

SEQ ID NO: 531523 - RNA, 32 nt, Human
uguuggaggggugggagggaggaacaauuuuu

SEQ ID NO: 531524 - RNA, 32 nt, Human
uguuggagggucuccuggaggcugccaagggc

SEQ ID NO: 531525 - RNA, 32 nt, Human
uguuggaguaggggcagagggagggagccaag

SEQ ID NO: 531526 - RNA, 32 nt, Human
uguuggaguccuggaagagagagaugagccag

SEQ ID NO: 531527 - RNA, 32 nt, Human
uguuggauguguauagugucuuugccauuuua

SEQ ID NO: 531528 - RNA, 32 nt, Human
uguuggauuccagauugcuauuguaaaaucuc

SEQ ID NO: 531529 - RNA, 32 nt, Human
uguuggauuuuagcaaaagcauccaagaaaaa

SEQ ID NO: 531530 - RNA, 32 nt, Human
uguuggauuuucucagaugccuuuacacgcug

SEQ ID NO: 531531 - RNA, 32 nt, Human
uguuggcacagcugugcggugcuggcuguccc

SEQ ID NO: 531532 - RNA, 32 nt, Human
uguuggcaccuugagacuucccagcuuccaga

SEQ ID NO: 531533 - RNA, 23 nt, Human
uguuggcagacuagaguacagug

SEQ ID NO: 531534 - RNA, 32 nt, Human
uguuggcagggaggccuccuggaaccagucag

SEQ ID NO: 531535 - RNA, 32 nt, Human
uguuggcagucagagaugacugugcuguguca

SEQ ID NO: 531536 - RNA, 32 nt, Human
uguuggcauauuccccuuuucuuagauucuua

SEQ ID NO: 531537 - RNA, 32 nt, Human
uguuggcauggcuuugccacuuuaaaagugcc

SEQ ID NO: 531538 - RNA, 24 nt, Human
uguuggccaaaagcugcuuuccau

SEQ ID NO: 531539 - RNA, 28 nt, Human
uguuggccaagugcuuuucuucuugggc

SEQ ID NO: 531540 - RNA, 32 nt, Human
uguuggccacgcugcagaaaugagcuggagcu

SEQ ID NO: 531541 - RNA, 32 nt, Human
uguuggccaggaguucaaaaccagccugacca

SEQ ID NO: 531542 - RNA, 32 nt, Human
uguuggccaggauggucuccaucucuugaccu

SEQ ID NO: 531543 - RNA, 24 nt, Human
uguuggccaggcuggaaugcagug

SEQ ID NO: 531544 - RNA, 23 nt, Human
uguuggccaggcuggagugcagu

SEQ ID NO: 531545 - RNA, 24 nt, Human
uguuggccaggcuggagugcagug

SEQ ID NO: 531546 - RNA, 22 nt, Human
uguuggccaggcuggagugcgg

SEQ ID NO: 531547 - RNA, 32 nt, Human
uguuggccaggcuggucucacacuccugaccu

SEQ ID NO: 531548 - RNA, 32 nt, Human
uguuggccaugucuccccaacuccacaauauc

SEQ ID NO: 531549 - RNA, 32 nt, Human
uguuggccucgggggcgcgccgccgcggagac

SEQ ID NO: 531550 - RNA, 32 nt, Human
uguuggccucuggggcugucauggcccacgcg

SEQ ID NO: 531551 - RNA, 32 nt, Human
uguuggccucuuucugggucucugccuggguc

SEQ ID NO: 531552 - RNA, 22 nt, Human
uguuggccuuacaccacugcca

SEQ ID NO: 531553 - RNA, 32 nt, Human
uguuggccuuucuuagccuuuuucuguuucca

SEQ ID NO: 531554 - RNA, 32 nt, Human
uguuggcgggggcggagggcaggggaacggga

SEQ ID NO: 531555 - RNA, 32 nt, Human
uguuggcuaggauggucuccaucucuugaccu

SEQ ID NO: 531556 - RNA, 24 nt, Human
uguuggcuaggcuggaguaaaaug

SEQ ID NO: 531557 - RNA, 32 nt, Human
uguuggcucaacaauucuuuguuuuuaauugc

SEQ ID NO: 531558 - RNA, 32 nt, Human
uguuggcucacugcaaccuccaacucccuggu

SEQ ID NO: 531559 - RNA, 32 nt, Human
uguuggcuccaucucuccacacugccucuuuc

SEQ ID NO: 531560 - RNA, 32 nt, Human
uguuggcuccccucaccugucgguugccuucu

SEQ ID NO: 531561 - RNA, 21 nt, Human
uguuggcucccgccuguaauc

SEQ ID NO: 531562 - RNA, 32 nt, Human
uguuggcucuagacuggucucaucuccauugc

SEQ ID NO: 531563 - RNA, 32 nt, Human
uguuggcugccuggcccaugugcccacugucu

SEQ ID NO: 531564 - RNA, 32 nt, Human
uguuggcugcuugagcugggauauucaucuuu

SEQ ID NO: 531565 - RNA, 20 nt, Human
uguuggcuguugccuggaga

SEQ ID NO: 531566 - RNA, 32 nt, Human
uguuggcuuuaguguaagacaaggucacugug

SEQ ID NO: 531567 - RNA, 32 nt, Human
uguugggaaacagggagugagugaagggaacc

SEQ ID NO: 531568 - RNA, 21 nt, Human
uguugggaaggaaccuguggu

SEQ ID NO: 531569 - RNA, 32 nt, Human
uguugggacaggagguacaaaggggaguggug

SEQ ID NO: 531570 - RNA, 32 nt, Human
uguugggagagggggagggaggggagacagag

SEQ ID NO: 531571 - RNA, 32 nt, Human
uguugggaggccaaggcuggcagaucacugga

SEQ ID NO: 531572 - RNA, 32 nt, Human
uguugggauaacaggcaugagccacugugccc

SEQ ID NO: 531573 - RNA, 32 nt, Human
uguugggauuacaggcaagagccaacacgccc

SEQ ID NO: 531574 - RNA, 32 nt, Human
uguugggauuacaggcaaugagccaccacgcc

SEQ ID NO: 531575 - RNA, 32 nt, Human
uguugggauuacaggcauaagcauugcgccau

SEQ ID NO: 531576 - RNA, 32 nt, Human
uguugggauuacaggcaugaaucaccaugccu

SEQ ID NO: 531577 - RNA, 21 nt, Human
uguugggauuacaggcaugag

SEQ ID NO: 531578 - RNA, 32 nt, Human
uguugggauuacaggcaugagccaccacgccu

SEQ ID NO: 531579 - RNA, 32 nt, Human
uguugggauuacaggcaugagccaccacuccu

SEQ ID NO: 531580 - RNA, 32 nt, Human
uguugggauuacaggcaugagccaccaugccc

SEQ ID NO: 531581 - RNA, 32 nt, Human
uguugggauuacaggcaugagccaccgcaccu

SEQ ID NO: 531582 - RNA, 32 nt, Human
uguugggauuacaggcaugagccaccugaaaa

SEQ ID NO: 531583 - RNA, 32 nt, Human
uguugggauuacaggcaugagccacugcaccc

SEQ ID NO: 531584 - RNA, 32 nt, Human
uguugggauuacaggcaugagccacugcgccc

SEQ ID NO: 531585 - RNA, 32 nt, Human
uguugggauuacaggcaugagccacugcgccu

SEQ ID NO: 531586 - RNA, 32 nt, Human
uguugggauuacaggcaugagccacugugccu

SEQ ID NO: 531587 - RNA, 32 nt, Human
uguugggauuacaggcaugagccacugugcuu

SEQ ID NO: 531588 - RNA, 32 nt, Human
uguugggauuacaggcaugagcuacuacauac

SEQ ID NO: 531589 - RNA, 32 nt, Human
uguugggauuacaggcgugagccaccucacca

SEQ ID NO: 531590 - RNA, 21 nt, Human
uguugggauuacaggugugag

SEQ ID NO: 531591 - RNA, 21 nt, Human
uguugggauuauaggcgugag

SEQ ID NO: 531592 - RNA, 32 nt, Human
uguugggcaaagcaacucuuuuucaaccacug

SEQ ID NO: 531593 - RNA, 32 nt, Human
uguugggcacuucgggccucagaaaacagcag

SEQ ID NO: 531594 - RNA, 22 nt, Human
uguugggcaggcagguaagggg

SEQ ID NO: 531595 - RNA, 32 nt, Human
uguugggcagucucacuguccuaagguauguc

SEQ ID NO: 531596 - RNA, 32 nt, Human
uguugggcccaucuccuuugcacuuugcucag

SEQ ID NO: 531597 - RNA, 32 nt, Human
uguugggccuauaguagcagguuagugaguac

SEQ ID NO: 531598 - RNA, 32 nt, Human
uguugggcgagagguguucucugugcugugaa

SEQ ID NO: 531599 - RNA, 32 nt, Human
uguugggcucaagcguuucucuugccucagcc

SEQ ID NO: 531600 - RNA, 32 nt, Human
uguugggcuguuaacugcugcaccucauugcc

SEQ ID NO: 531601 - RNA, 32 nt, Human
uguugggcuuugcagcucacacccaacagauc

SEQ ID NO: 531602 - RNA, 20 nt, Human
uguuggggacagugcgugau

SEQ ID NO: 531603 - RNA, 32 nt, Human
uguuggggagagaagaaaggggguucagaggc

SEQ ID NO: 531604 - RNA, 32 nt, Human
uguuggggagagaaggauggagauaggaugga

SEQ ID NO: 531605 - RNA, 32 nt, Human
uguuggggagagaggcagaggcagcuggagcg

SEQ ID NO: 531606 - RNA, 32 nt, Human
uguuggggccaggcacaguggcccaggccugu

SEQ ID NO: 531607 - RNA, 32 nt, Human
uguuggggccuccagccagggcccucuagggg

SEQ ID NO: 531608 - RNA, 32 nt, Human
uguuggggcugaggggaaggaggagaagcucc

SEQ ID NO: 531609 - RNA, 32 nt, Human
uguuggggcuguaggccuggggcagguucaga

SEQ ID NO: 531610 - RNA, 32 nt, Human
uguugggggaaaggaaagaauucacuagaaau

SEQ ID NO: 531611 - RNA, 32 nt, Human
uguugggggagacaggagagagaucccacggg

SEQ ID NO: 531612 - RNA, 32 nt, Human
uguugggggagcaagggccuucugcuggagac

SEQ ID NO: 531613 - RNA, 32 nt, Human
uguuggggguagaaaaguuuggauaucagauc

SEQ ID NO: 531614 - RNA, 32 nt, Human
uguuggggguagugggaggagaacggucagaa

SEQ ID NO: 531615 - RNA, 18 nt, Human
uguugggggugagggaaa

SEQ ID NO: 531616 - RNA, 32 nt, Human
uguuggggguugggggcagaaaaugcucccug

SEQ ID NO: 531617 - RNA, 32 nt, Human
uguuggggugacccucccacacccagccugga

SEQ ID NO: 531618 - RNA, 32 nt, Human
uguuggggugcagccaagcaggaggccaaggg

SEQ ID NO: 531619 - RNA, 32 nt, Human
uguugggguggcacaguggcccaaagagcagc

SEQ ID NO: 531620 - RNA, 32 nt, Human
uguugggguguuuuugcuuagaaagguccccu

SEQ ID NO: 531621 - RNA, 32 nt, Human
uguugggucuuggguugugugguuugguagcu

SEQ ID NO: 531622 - RNA, 32 nt, Human
uguugggucuuguaguucaugagugcaggagu

SEQ ID NO: 531623 - RNA, 32 nt, Human
uguugggugggagcacaggcaccgggcaccau

SEQ ID NO: 531624 - RNA, 32 nt, Human
uguuggguugucaaaacugggguggggaaaag

SEQ ID NO: 531625 - RNA, 24 nt, Human
uguuggguuuuagccaguuugcca

SEQ ID NO: 531626 - RNA, 24 nt, Human
uguuggguuuugagcaggcuguua

SEQ ID NO: 531627 - RNA, 32 nt, Human
uguugguaaagcacaugguucaaaucuagaag

SEQ ID NO: 531628 - RNA, 32 nt, Human
uguugguagcugggaccucaucuuccugaggg

SEQ ID NO: 531629 - RNA, 32 nt, Human
uguugguaggaaaguggcagggcugggggaga

SEQ ID NO: 531630 - RNA, 32 nt, Human
uguugguaggagguggggccaagaguggggua

SEQ ID NO: 531631 - RNA, 32 nt, Human
uguugguauuacaggcaugagccgcuacaccc

SEQ ID NO: 531632 - RNA, 32 nt, Human
uguuggucauuucucaguccuauuucucaguu

SEQ ID NO: 531633 - RNA, 32 nt, Human
uguugguccugucucugcucucacaguucuuu

SEQ ID NO: 531634 - RNA, 32 nt, Human
uguuggucucaaacuccugaccucagguaauc

SEQ ID NO: 531635 - RNA, 32 nt, Human
uguuggucucgaacuccugaccucaugaucug

SEQ ID NO: 531636 - RNA, 32 nt, Human
uguuggugaaguguugggggauggagggcggg

SEQ ID NO: 531637 - RNA, 32 nt, Human
uguuggugccaugccaguacagccugcagaau

SEQ ID NO: 531638 - RNA, 32 nt, Human
uguugguggaaugggaugugagaggacacgcg

SEQ ID NO: 531639 - RNA, 32 nt, Human
uguugguggcaaaauugccaacauaaguuaau

SEQ ID NO: 531640 - RNA, 32 nt, Human
uguugguggguggcagcacuuccagugggaag

SEQ ID NO: 531641 - RNA, 32 nt, Human
uguuggugucggcagggcugucagggcacaug

SEQ ID NO: 531642 - RNA, 32 nt, Human
uguugguguuuaauaauuuggagcucauaaaa

SEQ ID NO: 531643 - RNA, 32 nt, Human
uguugguuaauuccugccuuccucccuuuucc

SEQ ID NO: 531644 - RNA, 23 nt, Human
uguugguuacauuacaaaugcau

SEQ ID NO: 531645 - RNA, 32 nt, Human
uguugguucccugauuuuugucuugagcaggc

SEQ ID NO: 531646 - RNA, 32 nt, Human
uguugguuccuaucaccucuuguccucaguuu

SEQ ID NO: 531647 - RNA, 32 nt, Human
uguugguugacugcccuggccccuuugcacac

SEQ ID NO: 531648 - RNA, 32 nt, Human
uguugguugaucugauauguaaaguucagccu

SEQ ID NO: 531649 - RNA, 32 nt, Human
uguugguugugguuuuucuaucagggaaguca

SEQ ID NO: 531650 - RNA, 32 nt, Human
uguugguuuacaauacagcaagccugaugguu

SEQ ID NO: 531651 - RNA, 32 nt, Human
uguugguuucacugagagcugccuccuggucu

SEQ ID NO: 531652 - RNA, 32 nt, Human
uguugguuuucaucuucaagaaguugauucca

SEQ ID NO: 531653 - RNA, 32 nt, Human
uguuguaaaauggccuaaaaguucaaggcaug

SEQ ID NO: 531654 - RNA, 32 nt, Human
uguuguaaagaauccucguuaagucauuuugu

SEQ ID NO: 531655 - RNA, 32 nt, Human
uguuguaagaaagacugugcagaggagugugg

SEQ ID NO: 531656 - RNA, 32 nt, Human
uguuguaaguguuuacaacuggcaugugcuuu

SEQ ID NO: 531657 - RNA, 32 nt, Human
uguuguacaagaugucagcuuugcugaaacgc

SEQ ID NO: 531658 - RNA, 32 nt, Human
uguuguacagccauuggggauuacacgugcag

SEQ ID NO: 531659 - RNA, 32 nt, Human
uguuguacauaccuacaaguaccauuuuugug

SEQ ID NO: 531660 - RNA, 32 nt, Human
uguuguaccaccuuggugagucauaugccacu

SEQ ID NO: 531661 - RNA, 32 nt, Human
uguuguaccacugcacuccagccugggugaca

SEQ ID NO: 531662 - RNA, 31 nt, Human
uguuguaccucuuuugcuugccaaaguacag

SEQ ID NO: 531663 - RNA, 32 nt, Human
uguuguagauacaaucagcugcuuuguuaccu

SEQ ID NO: 531664 - RNA, 32 nt, Human
uguuguagcuaauaacaacaggcacgucaagg

SEQ ID NO: 531665 - RNA, 32 nt, Human
uguuguagcuuugucuuuuuauuuuucuuuuc

SEQ ID NO: 531666 - RNA, 32 nt, Human
uguuguauaaggacuguaagaucaggggcauc

SEQ ID NO: 531667 - RNA, 32 nt, Human
uguuguaucuguguguuuaucuauuccacauu

SEQ ID NO: 531668 - RNA, 32 nt, Human
uguugucaacaaaccaagcaucagggggaaga

SEQ ID NO: 531669 - RNA, 32 nt, Human
uguugucaacaggcaccuggccagagugaaaa

SEQ ID NO: 531670 - RNA, 32 nt, Human
uguugucacccagcuggcuaugaagugaauaa

SEQ ID NO: 531671 - RNA, 32 nt, Human
uguugucacccaggcuggagugcaguggugug

SEQ ID NO: 531672 - RNA, 32 nt, Human
uguugucauacugucugugcugauggcuuggc

SEQ ID NO: 531673 - RNA, 32 nt, Human
uguugucaucugaguugagcacuggucacauu

SEQ ID NO: 531674 - RNA, 32 nt, Human
uguugucauuauauuugacugugguucaacag

SEQ ID NO: 531675 - RNA, 32 nt, Human
uguuguccaaggcuggaguguaguagugcuau

SEQ ID NO: 531676 - RNA, 24 nt, Human
uguuguccaggcuagagugcagug

SEQ ID NO: 531677 - RNA, 24 nt, Human
uguuguccaggcuggagggcagug

SEQ ID NO: 531678 - RNA, 24 nt, Human
uguuguccaggcuggagugcaaug

SEQ ID NO: 531679 - RNA, 22 nt, Human
uguuguccaggcuggagugcag

SEQ ID NO: 531680 - RNA, 23 nt, Human
uguuguccaggcuggagugcagu

SEQ ID NO: 531681 - RNA, 24 nt, Human
uguuguccaggcuggagugcagug

SEQ ID NO: 531682 - RNA, 32 nt, Human
uguugucccagugcccugguucagugucuccu

SEQ ID NO: 531683 - RNA, 32 nt, Human
uguugucccuuacaugauggugcugcaagaaa

SEQ ID NO: 531684 - RNA, 32 nt, Human
uguugucccuugccugccuguaaggaauaaag

SEQ ID NO: 531685 - RNA, 32 nt, Human
uguugucccuuucuuuuuauuuuuaaggccuu

SEQ ID NO: 531686 - RNA, 32 nt, Human
uguuguccuaggauugcauguuaguaccccua

SEQ ID NO: 531687 - RNA, 32 nt, Human
uguugucgccuaggcuggagugcaaugaugcg

SEQ ID NO: 531688 - RNA, 32 nt, Human
uguugucgcucgcucagcgucucccucucggc

SEQ ID NO: 531689 - RNA, 32 nt, Human
uguugucguguuuacaguuugcauuuugaaug

SEQ ID NO: 531690 - RNA, 32 nt, Human
uguugucuaaaauguggacucaggagccagac

SEQ ID NO: 531691 - RNA, 32 nt, Human
uguugucuauggcccccagccccagccucugg

SEQ ID NO: 531692 - RNA, 32 nt, Human
uguugucucaacccucucccuaaaaugacuga

SEQ ID NO: 531693 - RNA, 32 nt, Human
uguugucucacugcauccaaugcuuuuccuuc

SEQ ID NO: 531694 - RNA, 32 nt, Human
uguugucucccaggcuggagugcaguggcgug

SEQ ID NO: 531695 - RNA, 23 nt, Human
uguugucucuguguuguacagug

SEQ ID NO: 531696 - RNA, 32 nt, Human
uguugucugcuuucuuucuccuucuacuaugc

SEQ ID NO: 531697 - RNA, 32 nt, Human
uguugucuggaagggcagguucagaugcagcc

SEQ ID NO: 531698 - RNA, 32 nt, Human
uguugucuuacuugauauuucuugcccuagua

SEQ ID NO: 531699 - RNA, 32 nt, Human
uguugucuucucauggugagcuuuucugugcc

SEQ ID NO: 531700 - RNA, 32 nt, Human
uguugucuugaacaagucacacccucucuuaa

SEQ ID NO: 531701 - RNA, 32 nt, Human
uguugucuuuuacuuuuguuuuuaaccugggg

SEQ ID NO: 531702 - RNA, 32 nt, Human
uguugucuuuuuauguggaaacugcuagacaa

SEQ ID NO: 531703 - RNA, 32 nt, Human
uguugugacugcugccauuuuuggaaacaucu

SEQ ID NO: 531704 - RNA, 32 nt, Human
uguugugcaaagugcaaggcugaacauugaau

SEQ ID NO: 531705 - RNA, 32 nt, Human
uguugugcagcuucuccaccuccugguagagg

SEQ ID NO: 531706 - RNA, 24 nt, Human
uguugugcaggcuggagugcagug

SEQ ID NO: 531707 - RNA, 24 nt, Human
uguugugcaggcuguagugcagug

SEQ ID NO: 531708 - RNA, 32 nt, Human
uguugugcauccucaaccuccaucccugcccu

SEQ ID NO: 531709 - RNA, 32 nt, Human
uguugugccccaggcacugucacauauuauuu

SEQ ID NO: 531710 - RNA, 32 nt, Human
uguugugcccuggaaucagccugguugagcuc

SEQ ID NO: 531711 - RNA, 32 nt, Human
uguugugccugggcaucgucuggauuuuccca

SEQ ID NO: 531712 - RNA, 32 nt, Human
uguugugcggcgccaugcaggucuccagccuc

SEQ ID NO: 531713 - RNA, 32 nt, Human
uguugugcuaugagccucuguaaucaaaugcu

SEQ ID NO: 531714 - RNA, 32 nt, Human
uguugugcucaagugauucucccaucucagcc

SEQ ID NO: 531715 - RNA, 32 nt, Human
uguuguggacaggaaacaggaggcuggaggag

SEQ ID NO: 531716 - RNA, 32 nt, Human
uguuguggauccugcgugucuagacccacgug

SEQ ID NO: 531717 - RNA, 32 nt, Human
uguuguggauuuuucacaagaagauuaauaaa

SEQ ID NO: 531718 - RNA, 32 nt, Human
uguuguggccuuccugaacugggaagucccug

SEQ ID NO: 531719 - RNA, 32 nt, Human
uguuguggcgggugccuguaaucucagcuacu

SEQ ID NO: 531720 - RNA, 32 nt, Human
uguugugggaaugggaccuagguaggagguga

SEQ ID NO: 531721 - RNA, 32 nt, Human
uguugugggcagcgucuuucucugccuuugcu

SEQ ID NO: 531722 - RNA, 32 nt, Human
uguuguggggguuugucuugugcacuguaggu

SEQ ID NO: 531723 - RNA, 32 nt, Human
uguugugggguagggggaugggggagggauag

SEQ ID NO: 531724 - RNA, 32 nt, Human
uguuguggggugugacagggagcucuugcagc

SEQ ID NO: 531725 - RNA, 32 nt, Human
uguugugggugucugugugugaggucacccuc

SEQ ID NO: 531726 - RNA, 32 nt, Human
uguuguggugcgcaccuguaauuccagcuacu

SEQ ID NO: 531727 - RNA, 32 nt, Human
uguuguggugggcgccuguaaucccagcugcu

SEQ ID NO: 531728 - RNA, 32 nt, Human
uguuguguauaucucugguagauauguguuau

SEQ ID NO: 531729 - RNA, 31 nt, Human
uguuguguccugucucccagcagagacuaca

SEQ ID NO: 531730 - RNA, 32 nt, Human
uguuguguccugucucccagcagagacuacaa

SEQ ID NO: 531731 - RNA, 32 nt, Human
uguugugucgagaagcaacacuuugugaucuc

SEQ ID NO: 531732 - RNA, 32 nt, Human
uguugugugccuguagucccagcuacuuagga

SEQ ID NO: 531733 - RNA, 32 nt, Human
uguugugugggugggagugagacuggguagaa

SEQ ID NO: 531734 - RNA, 32 nt, Human
uguugugugugaauauguguuacaccuaggau

SEQ ID NO: 531735 - RNA, 32 nt, Human
uguuguguugcacuccaggcaccuggccaaga

SEQ ID NO: 531736 - RNA, 32 nt, Human
uguuguuaaaaggcuaaugucauuuuaaaauu

SEQ ID NO: 531737 - RNA, 32 nt, Human
uguuguuauuuuuaaaguacaguaggguguga

SEQ ID NO: 531738 - RNA, 32 nt, Human
uguuguuauuuuuaguagagacgguguuucac

SEQ ID NO: 531739 - RNA, 27 nt, Human
uguuguucaagacuuugaagcauugaa

SEQ ID NO: 531740 - RNA, 32 nt, Human
uguuguucaauuaucuccucccccucuucucu

SEQ ID NO: 531741 - RNA, 32 nt, Human
uguuguucauuuucagcacuuacuucaaaaga

SEQ ID NO: 531742 - RNA, 21 nt, Human
uguuguuccccuucccucaca

SEQ ID NO: 531743 - RNA, 32 nt, Human
uguuguucccugcacugcucccugcacuguuc

SEQ ID NO: 531744 - RNA, 23 nt, Human
uguuguuccucugcucugucaca

SEQ ID NO: 531745 - RNA, 32 nt, Human
uguuguuccuggcuggacuugauguccagggc

SEQ ID NO: 531746 - RNA, 32 nt, Human
uguuguucucaggaacauaguugcaggugugu

SEQ ID NO: 531747 - RNA, 32 nt, Human
uguuguucugcacuuaaccuagagagagaaaa

SEQ ID NO: 531748 - RNA, 32 nt, Human
uguuguucuuacaucauugauucauguaagua

SEQ ID NO: 531749 - RNA, 24 nt, Human
uguuguucuucccuauacuucaca

SEQ ID NO: 531750 - RNA, 32 nt, Human
uguuguugaauacuucauucacaagggaaaua

SEQ ID NO: 531751 - RNA, 32 nt, Human
uguuguugaauccauagccaauacauuuacag

SEQ ID NO: 531752 - RNA, 32 nt, Human
uguuguugagacaaggucucgcuguugcccag

SEQ ID NO: 531753 - RNA, 32 nt, Human
uguuguugaguucucugggucagaccucugaa

SEQ ID NO: 531754 - RNA, 32 nt, Human
uguuguugcagaugucagcagcaacaacaaag

SEQ ID NO: 531755 - RNA, 32 nt, Human
uguuguugcccaggcuggagugcaauagcacg

SEQ ID NO: 531756 - RNA, 32 nt, Human
uguuguugcccaggcuggagugcaauggcacg

SEQ ID NO: 531757 - RNA, 32 nt, Human
uguuguugcccaggcuggagugcaauggcgcg

SEQ ID NO: 531758 - RNA, 32 nt, Human
uguuguugcccaggcuggagugcaauggcgua

SEQ ID NO: 531759 - RNA, 32 nt, Human
uguuguugcccaggcuggagugcaguggcgug

SEQ ID NO: 531760 - RNA, 32 nt, Human
uguuguugggaaacagggagugagugaaggga

SEQ ID NO: 531761 - RNA, 32 nt, Human
uguuguuuaaauucauuugaaaccagaagggg

SEQ ID NO: 531762 - RNA, 32 nt, Human
uguuguuuacaaacucagguacccgcagggcc

SEQ ID NO: 531763 - RNA, 32 nt, Human
uguuguuuacauuuugcugugacauuuaaaaa

SEQ ID NO: 531764 - RNA, 32 nt, Human
uguuguuucucuacuuuguuuuguuuuaggcu

SEQ ID NO: 531765 - RNA, 32 nt, Human
uguuguuugcccagccugggcugcagaaagca

SEQ ID NO: 531766 - RNA, 32 nt, Human
uguuguuugucuuugaugucaugguccccucu

SEQ ID NO: 531767 - RNA, 32 nt, Human
uguuguuuuacuauuuguuugacauaucagua

SEQ ID NO: 531768 - RNA, 24 nt, Human
uguuguuuuauuuaaagcauugaa

SEQ ID NO: 531769 - RNA, 24 nt, Human
uguuguuuuauuuagaaacaugaa

SEQ ID NO: 531770 - RNA, 32 nt, Human
uguuguuuugagacagggucucacuuugucac

SEQ ID NO: 531771 - RNA, 32 nt, Human
uguuguuuugagacagggucuugcccuguugc

SEQ ID NO: 531772 - RNA, 32 nt, Human
uguuguuuugagauggagucucgcucugucac

SEQ ID NO: 531773 - RNA, 32 nt, Human
uguuguuuugagauggaguuucgcucuuguug

SEQ ID NO: 531774 - RNA, 32 nt, Human
uguuguuuugagauggaguuuugcucuugcac

SEQ ID NO: 531775 - RNA, 32 nt, Human
uguuguuuuguagcaaccauuuguaaaacauu

SEQ ID NO: 531776 - RNA, 32 nt, Human
uguuguuuuuauuaaucuuuugucuuaaaaua

SEQ ID NO: 531777 - RNA, 32 nt, Human
uguuuaaaacacauuugaauuuauuucucagc

SEQ ID NO: 531778 - RNA, 32 nt, Human
uguuuaaagaagcccagggagggauagagcuc

SEQ ID NO: 531779 - RNA, 32 nt, Human
uguuuaaagauggaugaaaggccaggcauggu

SEQ ID NO: 531780 - RNA, 32 nt, Human
uguuuaaaguaacuaccaccuaacccaacaga

SEQ ID NO: 531781 - RNA, 32 nt, Human
uguuuaaagugucaccccucacugugacugau

SEQ ID NO: 531782 - RNA, 32 nt, Human
uguuuaaaucagcuguuucauguauuagccuu

SEQ ID NO: 531783 - RNA, 32 nt, Human
uguuuaaauggaaaggagaaugacagcaaagc

SEQ ID NO: 531784 - RNA, 32 nt, Human
uguuuaaauuacagauaacuucaagaguuuuc

SEQ ID NO: 531785 - RNA, 32 nt, Human
uguuuaacacggggaaaccccgucucuacuaa

SEQ ID NO: 531786 - RNA, 32 nt, Human
uguuuaacacgguuacugacuuagaugaugua

SEQ ID NO: 531787 - RNA, 32 nt, Human
uguuuaacaucagggugaccacauuaagccca

SEQ ID NO: 531788 - RNA, 32 nt, Human
uguuuaacauggcugagcccucucugaggcca

SEQ ID NO: 531789 - RNA, 32 nt, Human
uguuuaaccacugcuaucacgcuauccuggga

SEQ ID NO: 531790 - RNA, 20 nt, Human
uguuuaaccuguugcuuccu

SEQ ID NO: 531791 - RNA, 32 nt, Human
uguuuaacucuuuggugucugugcucaaaaga

SEQ ID NO: 531792 - RNA, 32 nt, Human
uguuuaacuguuuguuaucauaguuggucaau

SEQ ID NO: 531793 - RNA, 32 nt, Human
uguuuaagagagagugguuccugcuguuuauu

SEQ ID NO: 531794 - RNA, 32 nt, Human
uguuuaagaggucaggaggccugcugaucuuu

SEQ ID NO: 531795 - RNA, 32 nt, Human
uguuuaagcuuuguuccuuuuuauggcugagc

SEQ ID NO: 531796 - RNA, 32 nt, Human
uguuuaaggagcaagacaggaaggagaaacca

SEQ ID NO: 531797 - RNA, 32 nt, Human
uguuuaaggagguggggcgcguuucaguggcu

SEQ ID NO: 531798 - RNA, 32 nt, Human
uguuuaagggcugcauuccaugaugcuaucag

SEQ ID NO: 531799 - RNA, 32 nt, Human
uguuuaagugaucaggaugccguugguggcau

SEQ ID NO: 531800 - RNA, 32 nt, Human
uguuuaauaacuucuaauggccaucuguaaac

SEQ ID NO: 531801 - RNA, 32 nt, Human
uguuuaauguacuuggaguuuccuuguaguag

SEQ ID NO: 531802 - RNA, 32 nt, Human
uguuuaauuaaccccauguccacuuugccucu

SEQ ID NO: 531803 - RNA, 32 nt, Human
uguuuaauuuucacaaauuugugaauuuucca

SEQ ID NO: 531804 - RNA, 32 nt, Human
uguuuacacaccacuuuccugccuccucucug

SEQ ID NO: 531805 - RNA, 32 nt, Human
uguuuacagauuauugguuacacuucaauuua

SEQ ID NO: 531806 - RNA, 32 nt, Human
uguuuacagcauauuuaagucuugugaaacug

SEQ ID NO: 531807 - RNA, 32 nt, Human
uguuuacaggcaagcccugcuccugggagggc

SEQ ID NO: 531808 - RNA, 32 nt, Human
uguuuacagucacccuuggguccuaaauuaag

SEQ ID NO: 531809 - RNA, 32 nt, Human
uguuuacauagagauucaucacugcagauuac

SEQ ID NO: 531810 - RNA, 32 nt, Human
uguuuacauauauaccuauauguaaguguuuu

SEQ ID NO: 531811 - RNA, 32 nt, Human
uguuuacauaugcauagcgcugcacucagucg

SEQ ID NO: 531812 - RNA, 32 nt, Human
uguuuacauggcgcccugccuccuggaggacc

SEQ ID NO: 531813 - RNA, 32 nt, Human
uguuuacauuuugcugugacauuuaaaaauau

SEQ ID NO: 531814 - RNA, 32 nt, Human
uguuuaccaacuucucuuucuccuccuuuccc

SEQ ID NO: 531815 - RNA, 32 nt, Human
uguuuaccaagcuaugugacuucucccaaagg

SEQ ID NO: 531816 - RNA, 32 nt, Human
uguuuaccaagguccugcugugcacuuagaau

SEQ ID NO: 531817 - RNA, 32 nt, Human
uguuuaccaguauuaaauucucagccacucaa

SEQ ID NO: 531818 - RNA, 32 nt, Human
uguuuaccaugucagcuucagccugggggcuc

SEQ ID NO: 531819 - RNA, 32 nt, Human
uguuuaccuaacccagcccuuaauuagggcuu

SEQ ID NO: 531820 - RNA, 32 nt, Human
uguuuaccuauguaacaaaccugcacauccug

SEQ ID NO: 531821 - RNA, 32 nt, Human
uguuuaccuauguaacaaaccugcacguucug

SEQ ID NO: 531822 - RNA, 32 nt, Human
uguuuaccuauguaacaaaccugcauauccug

SEQ ID NO: 531823 - RNA, 32 nt, Human
uguuuaccuauguagaaaccuucauauguauc

SEQ ID NO: 531824 - RNA, 32 nt, Human
uguuuaccuuggucuuguuuuaagucuuaaaa

SEQ ID NO: 531825 - RNA, 32 nt, Human
uguuuaccuuucucucucuaagguuuacaaua

SEQ ID NO: 531826 - RNA, 32 nt, Human
uguuuacuagcuugguggaugagggaguggug

SEQ ID NO: 531827 - RNA, 32 nt, Human
uguuuacuagugaaaugagaaaagcaaagcua

SEQ ID NO: 531828 - RNA, 32 nt, Human
uguuuacuaucuauugcuguaaaguuuuguau

SEQ ID NO: 531829 - RNA, 32 nt, Human
uguuuacuccagccuauggauccgugaccaau

SEQ ID NO: 531830 - RNA, 32 nt, Human
uguuuacugaacaccacucugugcuaagcccu

SEQ ID NO: 531831 - RNA, 32 nt, Human
uguuuacuuggucccagcuuuugagagauaaa

SEQ ID NO: 531832 - RNA, 32 nt, Human
uguuuagaaauguauuucuccacagggcugac

SEQ ID NO: 531833 - RNA, 32 nt, Human
uguuuagaacuacgacuugcucugucauucca

SEQ ID NO: 531834 - RNA, 32 nt, Human
uguuuagaaguaaccacagaaaagcaaaguca

SEQ ID NO: 531835 - RNA, 32 nt, Human
uguuuagaaguaggaagucacugugagcaaug

SEQ ID NO: 531836 - RNA, 32 nt, Human
uguuuagaauacugguuuucuauuuacgcaug

SEQ ID NO: 531837 - RNA, 32 nt, Human
uguuuagacagagagguaaggccugaaaaagu

SEQ ID NO: 531838 - RNA, 32 nt, Human
uguuuagagaaggcuucuccucugagcuggga

SEQ ID NO: 531839 - RNA, 32 nt, Human
uguuuagagccaggaggaaggcggaagguagg

SEQ ID NO: 531840 - RNA, 32 nt, Human
uguuuagagccugauauucuuccuccaagaau

SEQ ID NO: 531841 - RNA, 32 nt, Human
uguuuagaggcucugcccugagguucugcucc

SEQ ID NO: 531842 - RNA, 32 nt, Human
uguuuagauccagaaggagaguuuuaaucauu

SEQ ID NO: 531843 - RNA, 32 nt, Human
uguuuagaugaucuguccauuguugagauagg

SEQ ID NO: 531844 - RNA, 32 nt, Human
uguuuagcagcaucugucuccuccgcugacua

SEQ ID NO: 531845 - RNA, 32 nt, Human
uguuuagcugaguuuucuaauuuucuggaugu

SEQ ID NO: 531846 - RNA, 32 nt, Human
uguuuagcuggcucgaugauguuaacaguauu

SEQ ID NO: 531847 - RNA, 32 nt, Human
uguuuagcuuuuccuaguauugugagguuuca

SEQ ID NO: 531848 - RNA, 32 nt, Human
uguuuaggaagaaacucacucucuuuugccag

SEQ ID NO: 531849 - RNA, 32 nt, Human
uguuuaggaguuagggugaaagagaaaauguu

SEQ ID NO: 531850 - RNA, 32 nt, Human
uguuuaggcuuaguaaaccaguucccaaacac

SEQ ID NO: 531851 - RNA, 32 nt, Human
uguuuagggcccugauuugcugggcaguuuuu

SEQ ID NO: 531852 - RNA, 32 nt, Human
uguuuaggucccaauaaggaaggucugucccu

SEQ ID NO: 531853 - RNA, 32 nt, Human
uguuuaggugaucucaaauuaggaaaugcauu

SEQ ID NO: 531854 - RNA, 32 nt, Human
uguuuagguugaggacauacauucaaacuaau

SEQ ID NO: 531855 - RNA, 32 nt, Human
uguuuaguauauucagcuguaucuguagaaac

SEQ ID NO: 531856 - RNA, 32 nt, Human
uguuuagucauguguuuucaucuaagaaauua

SEQ ID NO: 531857 - RNA, 32 nt, Human
uguuuaguccacuugggucaucagcucugcca

SEQ ID NO: 531858 - RNA, 32 nt, Human
uguuuagucccagcuacacagcagggaggcug

SEQ ID NO: 531859 - RNA, 32 nt, Human
uguuuagucgcuuucaggguucuugagccccu

SEQ ID NO: 531860 - RNA, 32 nt, Human
uguuuaguguauuaauuaccaguggauuggua

SEQ ID NO: 531861 - RNA, 32 nt, Human
uguuuaguuccccacuuuaaugaugcuaaaau

SEQ ID NO: 531862 - RNA, 32 nt, Human
uguuuaguuuuagguuuacaacagagaggaau

SEQ ID NO: 531863 - RNA, 32 nt, Human
uguuuauaaaaauugaguggagauagauagac

SEQ ID NO: 531864 - RNA, 32 nt, Human
uguuuauaaaggccaaaugauagcgggggcua

SEQ ID NO: 531865 - RNA, 32 nt, Human
uguuuauaaugucugggagagaggauaggaug

SEQ ID NO: 531866 - RNA, 21 nt, Human
uguuuauacaauuuaauuuaa

SEQ ID NO: 531867 - RNA, 32 nt, Human
uguuuauaggagaaagcaaaauacaucagcuu

SEQ ID NO: 531868 - RNA, 32 nt, Human
uguuuaucaagcaaugcucagcuugaagaaua

SEQ ID NO: 531869 - RNA, 32 nt, Human
uguuuaucagaaagggcagaaguaggggaaga

SEQ ID NO: 531870 - RNA, 32 nt, Human
uguuuauccuacagcuuccugcaagcuccagu

SEQ ID NO: 531871 - RNA, 32 nt, Human
uguuuaucucauuuggcuaauagauggaaauc

SEQ ID NO: 531872 - RNA, 32 nt, Human
uguuuaucucccacuuacgagaacaugugguu

SEQ ID NO: 531873 - RNA, 32 nt, Human
uguuuaugacaguuugucauuuggcggguugg

SEQ ID NO: 531874 - RNA, 32 nt, Human
uguuuaugacuuauuugcucagaagaggcacg

SEQ ID NO: 531875 - RNA, 30 nt, Human
uguuuaugagccuggaagccacgaaguggu

SEQ ID NO: 531876 - RNA, 32 nt, Human
uguuuaugccuccauugccccaguucuuaucu

SEQ ID NO: 531877 - RNA, 32 nt, Human
uguuuaugcuaaaaauaacaccaaaauguggu

SEQ ID NO: 531878 - RNA, 32 nt, Human
uguuuauggaaauaccaggaccaguuuauguu

SEQ ID NO: 531879 - RNA, 31 nt, Human
uguuuauggacaauguucagcugacauaagc

SEQ ID NO: 531880 - RNA, 32 nt, Human
uguuuauggccucccuuaaggcauuuuacaaa

SEQ ID NO: 531881 - RNA, 32 nt, Human
uguuuauguaagagcaccuuccucacuuccau

SEQ ID NO: 531882 - RNA, 32 nt, Human
uguuuauuaagccagggauugugggacuuccc

SEQ ID NO: 531883 - RNA, 32 nt, Human
uguuuauuaguucuguauacaguacaggaucu

SEQ ID NO: 531884 - RNA, 32 nt, Human
uguuuauuccauccuuguuugaugaucgacca

SEQ ID NO: 531885 - RNA, 32 nt, Human
uguuuauuccuuggcuugccucccuccuuccu

SEQ ID NO: 531886 - RNA, 32 nt, Human
uguuuauugagcacuuacuuggaccaagcacu

SEQ ID NO: 531887 - RNA, 32 nt, Human
uguuuauugaggaaaaggaaugggaggcaaau

SEQ ID NO: 531888 - RNA, 32 nt, Human
uguuuauuugcuccuucucuucaugccugugg

SEQ ID NO: 531889 - RNA, 32 nt, Human
uguuuauuugggaccagaacaugguccaguuu

SEQ ID NO: 531890 - RNA, 32 nt, Human
uguuuauuuuaccucuauucuuuagguugaaa

SEQ ID NO: 531891 - RNA, 32 nt, Human
uguuuauuuucuucccuucccuucccuucccu

SEQ ID NO: 531892 - RNA, 32 nt, Human
uguuucaaacaugcccauuacuaacggcaaaa

SEQ ID NO: 531893 - RNA, 23 nt, Human
uguuucaaaguugaaacuacugu

SEQ ID NO: 531894 - RNA, 22 nt, Human
uguuucaacuugaagacaccgu

SEQ ID NO: 531895 - RNA, 32 nt, Human
uguuucaagagucauguuuccccagaugugau

SEQ ID NO: 531896 - RNA, 32 nt, Human
uguuucacaagacagauucuguccuugucacc

SEQ ID NO: 531897 - RNA, 32 nt, Human
uguuucacaccaaaagccuguguguuccucca

SEQ ID NO: 531898 - RNA, 32 nt, Human
uguuucacacucauuccucccauccaguguuu

SEQ ID NO: 531899 - RNA, 32 nt, Human
uguuucacauaaaaauacuucugacauaaagu

SEQ ID NO: 531900 - RNA, 32 nt, Human
uguuucaccauguuagucaggcuggucucgaa

SEQ ID NO: 531901 - RNA, 32 nt, Human
uguuucaccauguuggccaggcuggucucaaa

SEQ ID NO: 531902 - RNA, 32 nt, Human
uguuucaccauguuggccaggcuggucuccau

SEQ ID NO: 531903 - RNA, 32 nt, Human
uguuucaccauguuggucaggcuggucaugaa

SEQ ID NO: 531904 - RNA, 32 nt, Human
uguuucaccauguuggucaggcuggucucgaa

SEQ ID NO: 531905 - RNA, 32 nt, Human
uguuucaccauguuggucaggcuggucuugaa

SEQ ID NO: 531906 - RNA, 32 nt, Human
uguuucacccauauugcugguccuguuuuuca

SEQ ID NO: 531907 - RNA, 32 nt, Human
uguuucaccuuuccucagacuauuuuccagcc

SEQ ID NO: 531908 - RNA, 32 nt, Human
uguuucacuacauucuuccucccacugccagg

SEQ ID NO: 531909 - RNA, 32 nt, Human
uguuucagacuuuuguuugugugcuugcguug

SEQ ID NO: 531910 - RNA, 32 nt, Human
uguuucagaggugauuacaggccuggguuuga

SEQ ID NO: 531911 - RNA, 32 nt, Human
uguuucagauacauaguuuguaccuguauuuu

SEQ ID NO: 531912 - RNA, 22 nt, Human
uguuucagauucugaugaugaa

SEQ ID NO: 531913 - RNA, 32 nt, Human
uguuucagcauccauucccccuucuuuuagga

SEQ ID NO: 531914 - RNA, 32 nt, Human
uguuucagccucccgaguagcuggaauugcag

SEQ ID NO: 531915 - RNA, 32 nt, Human
uguuucagccuccugaguagcugggauuacag

SEQ ID NO: 531916 - RNA, 32 nt, Human
uguuucagccucugccuuuccacagcuccucc

SEQ ID NO: 531917 - RNA, 32 nt, Human
uguuucaggaagaagagagcagguagaaaggg

SEQ ID NO: 531918 - RNA, 32 nt, Human
uguuucaggaaggaaugaaagagaguucuuuc

SEQ ID NO: 531919 - RNA, 32 nt, Human
uguuucaggcaugauacuaggcaauuuauaua

SEQ ID NO: 531920 - RNA, 32 nt, Human
uguuucaggggugacucagaagaaaaagaagc

SEQ ID NO: 531921 - RNA, 31 nt, Human
uguuucagguauuucuuuaccccucuggauu

SEQ ID NO: 531922 - RNA, 32 nt, Human
uguuucagucagugacagaccucauauauggc

SEQ ID NO: 531923 - RNA, 32 nt, Human
uguuucaguccagugcacaucagcauugcuga

SEQ ID NO: 531924 - RNA, 32 nt, Human
uguuucaguucugugucaugguuggaagacag

SEQ ID NO: 531925 - RNA, 32 nt, Human
uguuucauaagaaggaaggcaggugaauaugu

SEQ ID NO: 531926 - RNA, 32 nt, Human
uguuucauaagaauucuguugauggaaauaca

SEQ ID NO: 531927 - RNA, 32 nt, Human
uguuucauaauguugugaaacuccacuugaag

SEQ ID NO: 531928 - RNA, 32 nt, Human
uguuucaucucccauucaucucccuccuccca

SEQ ID NO: 531929 - RNA, 32 nt, Human
uguuucaucucuaugacccuucuguuaccaca

SEQ ID NO: 531930 - RNA, 32 nt, Human
uguuucaucuguccccuuuuagcuccaccuga

SEQ ID NO: 531931 - RNA, 32 nt, Human
uguuucaucuucuucuuuacuuuuagcuucua

SEQ ID NO: 531932 - RNA, 32 nt, Human
uguuuccaacuugaaaccauuuugucacaucu

SEQ ID NO: 531933 - RNA, 32 nt, Human
uguuuccaauugccuccucuccggcuguggca

SEQ ID NO: 531934 - RNA, 32 nt, Human
uguuuccacagccugcaaguucaguccaggau

SEQ ID NO: 531935 - RNA, 32 nt, Human
uguuuccaccuccaugcuuccaagaaggagga

SEQ ID NO: 531936 - RNA, 32 nt, Human
uguuuccacuggcuuuccauccccauggggca

SEQ ID NO: 531937 - RNA, 32 nt, Human
uguuuccagaugaccagauuguuuuucugaaa

SEQ ID NO: 531938 - RNA, 32 nt, Human
uguuucccagccuguaccuuggaagccgaagg

SEQ ID NO: 531939 - RNA, 32 nt, Human
uguuucccaggaaaucaaagauguaaaugauu

SEQ ID NO: 531940 - RNA, 24 nt, Human
uguuucccaggcugaagugcagug

SEQ ID NO: 531941 - RNA, 24 nt, Human
uguuucccaggcuggagugcaaug

SEQ ID NO: 531942 - RNA, 24 nt, Human
uguuucccaggcuggagugcagug

SEQ ID NO: 531943 - RNA, 24 nt, Human
uguuucccaggcuggaguguagug

SEQ ID NO: 531944 - RNA, 32 nt, Human
uguuuccccucagaacacccuguaccauccau

SEQ ID NO: 531945 - RNA, 32 nt, Human
uguuuccccugccacuccagcccccuugagcu

SEQ ID NO: 531946 - RNA, 32 nt, Human
uguuucccuacggagagcacuuggagauggca

SEQ ID NO: 531947 - RNA, 32 nt, Human
uguuucccucaagacauaaaacaaauauaaac

SEQ ID NO: 531948 - RNA, 32 nt, Human
uguuucccucaaggaccuuucugccuggaagu

SEQ ID NO: 531949 - RNA, 32 nt, Human
uguuucccuccaggaaaccaucccugcucacc

SEQ ID NO: 531950 - RNA, 32 nt, Human
uguuucccuccccacuacuccuucuccuucua

SEQ ID NO: 531951 - RNA, 32 nt, Human
uguuucccuugcaauauguuaacucuguguag

SEQ ID NO: 531952 - RNA, 32 nt, Human
uguuucccuugguggauuuuuguguuuuguaa

SEQ ID NO: 531953 - RNA, 32 nt, Human
uguuuccgccguccugcuuccugccgaggcug

SEQ ID NO: 531954 - RNA, 32 nt, Human
uguuuccgcgggcagagauuuugaacacccaa

SEQ ID NO: 531955 - RNA, 32 nt, Human
uguuuccgucugcucaccugccacagagccca

SEQ ID NO: 531956 - RNA, 32 nt, Human
uguuuccuauuaaaauacagacauuucuaccc

SEQ ID NO: 531957 - RNA, 32 nt, Human
uguuuccuccuccaaaaugcuccugcuccucu

SEQ ID NO: 531958 - RNA, 32 nt, Human
uguuuccuccucccccgccucuuccaguucaa

SEQ ID NO: 531959 - RNA, 32 nt, Human
uguuuccucuacuccuggcucagaaacagcca

SEQ ID NO: 531960 - RNA, 32 nt, Human
uguuuccugaauucuugacauuuaucuuugcu

SEQ ID NO: 531961 - RNA, 32 nt, Human
uguuuccugcagcauguauuuccauggcccac

SEQ ID NO: 531962 - RNA, 32 nt, Human
uguuuccugccugucagccucuugccuccuaa

SEQ ID NO: 531963 - RNA, 32 nt, Human
uguuuccugggccucugcucagaggcagguca

SEQ ID NO: 531964 - RNA, 32 nt, Human
uguuuccugggugcccuggcuccuugcagcag

SEQ ID NO: 531965 - RNA, 32 nt, Human
uguuuccuguaaccaggauacagucugguugg

SEQ ID NO: 531966 - RNA, 32 nt, Human
uguuuccuguggccaggcacagagccaggugc

SEQ ID NO: 531967 - RNA, 19 nt, Human
uguuuccuuccucuacaua

SEQ ID NO: 531968 - RNA, 32 nt, Human
uguuuccuucugucaugcuuuccacuucuucc

SEQ ID NO: 531969 - RNA, 32 nt, Human
uguuuccuuggcccugcagcaggaugaagcuc

SEQ ID NO: 531970 - RNA, 32 nt, Human
uguuuccuuuucuccccucucuggguugacug

SEQ ID NO: 531971 - RNA, 18 nt, Human
uguuuccuuuugggcuca

SEQ ID NO: 531972 - RNA, 32 nt, Human
uguuucgaggugccucaacauggagccuugcc

SEQ ID NO: 531973 - RNA, 32 nt, Human
uguuucgccacugcacaccagccugggugaca

SEQ ID NO: 531974 - RNA, 32 nt, Human
uguuucgcgggggagugagggggaagaacacg

SEQ ID NO: 531975 - RNA, 32 nt, Human
uguuucguagacugagaacauggagggacugg

SEQ ID NO: 531976 - RNA, 32 nt, Human
uguuucuaaagaaacgucaguauuucagucug

SEQ ID NO: 531977 - RNA, 32 nt, Human
uguuucuaccagaugagcaggaagagauucca

SEQ ID NO: 531978 - RNA, 24 nt, Human
uguuucuacuaaaaauaaaaaaua

SEQ ID NO: 531979 - RNA, 32 nt, Human
uguuucuacuaaaaauacaaaaaugagcuggg

SEQ ID NO: 531980 - RNA, 32 nt, Human
uguuucuacuaaaaauacaaaaauuagccgag

SEQ ID NO: 531981 - RNA, 32 nt, Human
uguuucuacuaaaaauacaaaaauuagcuagg

SEQ ID NO: 531982 - RNA, 32 nt, Human
uguuucuacuaaaaauacaaaaauuagcugga

SEQ ID NO: 531983 - RNA, 32 nt, Human
uguuucuacuaaaaauacaaaaauuagcuggg

SEQ ID NO: 531984 - RNA, 32 nt, Human
uguuucuacuaaaauauacaaaaauuagccag

SEQ ID NO: 531985 - RNA, 32 nt, Human
uguuucuacugaaaauacaaaaauuagccagg

SEQ ID NO: 531986 - RNA, 32 nt, Human
uguuucuagguaguaggaaccuuacaaauaca

SEQ ID NO: 531987 - RNA, 23 nt, Human
uguuucuauuuuauggaugagca

SEQ ID NO: 531988 - RNA, 32 nt, Human
uguuucucagaaaagguuaccuuuguauuaau

SEQ ID NO: 531989 - RNA, 32 nt, Human
uguuucucaguguuccuuaacagccugccuuu

SEQ ID NO: 531990 - RNA, 32 nt, Human
uguuucucaguuauccagggaagaacagugua

SEQ ID NO: 531991 - RNA, 32 nt, Human
uguuucuccagccgugcggugcagccucaugc

SEQ ID NO: 531992 - RNA, 32 nt, Human
uguuucuccaucuaccaccauccaccagucua

SEQ ID NO: 531993 - RNA, 32 nt, Human
uguuucuccuaccugggagauuucagcaagga

SEQ ID NO: 531994 - RNA, 32 nt, Human
uguuucuccuccugaaauguuuaugaauugcu

SEQ ID NO: 531995 - RNA, 32 nt, Human
uguuucucuaaaggucucccaggccuucccag

SEQ ID NO: 531996 - RNA, 21 nt, Human
uguuucucuaguguuauggca

SEQ ID NO: 531997 - RNA, 32 nt, Human
uguuucucuccuccgcuuaaccaagcuguugu

SEQ ID NO: 531998 - RNA, 32 nt, Human
uguuucucugggagguaggacggcugcuuccu

SEQ ID NO: 531999 - RNA, 32 nt, Human
uguuucugaaaagcaacugaggugugacuguu

SEQ ID NO: 532000 - RNA, 32 nt, Human
uguuucugaaauccaacaugcuuuagacuuga

SEQ ID NO: 532001 - RNA, 32 nt, Human
uguuucugaacugucuucuuuugcaagacuga

SEQ ID NO: 532002 - RNA, 32 nt, Human
uguuucugaacuuuacuuacuaauuuucagug

SEQ ID NO: 532003 - RNA, 32 nt, Human
uguuucugacagacugauacugaugccaaaca

SEQ ID NO: 532004 - RNA, 32 nt, Human
uguuucugacccuuucugucggaguggucucu

SEQ ID NO: 532005 - RNA, 32 nt, Human
uguuucugcagaggcagcaggagccagcccgg

SEQ ID NO: 532006 - RNA, 32 nt, Human
uguuucugccaaaaauacaaaaauuagcuggg

SEQ ID NO: 532007 - RNA, 32 nt, Human
uguuucugccaagggauugacauggagggagc

SEQ ID NO: 532008 - RNA, 21 nt, Human
uguuucugccacccuguaaca

SEQ ID NO: 532009 - RNA, 32 nt, Human
uguuucugcccucuguguuuccuguugucaaa

SEQ ID NO: 532010 - RNA, 32 nt, Human
uguuucugcuuugccaugacccuggucauccu

SEQ ID NO: 532011 - RNA, 22 nt, Human
uguuucuggaaacugcuugcca

SEQ ID NO: 532012 - RNA, 20 nt, Human
uguuucuggaaggcaucugc

SEQ ID NO: 532013 - RNA, 32 nt, Human
uguuucuggaguuuacaugaugaccaagguac

SEQ ID NO: 532014 - RNA, 32 nt, Human
uguuucuggauugaagccagaaucaacauugu

SEQ ID NO: 532015 - RNA, 32 nt, Human
uguuucuggcuccacugccugccagugaagga

SEQ ID NO: 532016 - RNA, 32 nt, Human
uguuucugggagaggaaaccugaagcccagag

SEQ ID NO: 532017 - RNA, 32 nt, Human
uguuucuggggcucugaaaaucugugggaacu

SEQ ID NO: 532018 - RNA, 32 nt, Human
uguuucuguagucccagcuacucgggaggcug

SEQ ID NO: 532019 - RNA, 32 nt, Human
uguuucugugaacaugaaguucugcgguagug

SEQ ID NO: 532020 - RNA, 32 nt, Human
uguuucugugagagugacagagcugugcccgu

SEQ ID NO: 532021 - RNA, 32 nt, Human
uguuucuguggcagacauugcuaaucaauuac

SEQ ID NO: 532022 - RNA, 32 nt, Human
uguuucuguguauccuauugcuggugacucug

SEQ ID NO: 532023 - RNA, 32 nt, Human
uguuucugugucauuaaccaucuuuaaucaau

SEQ ID NO: 532024 - RNA, 32 nt, Human
uguuucuguguguuguccagcguauucauuca

SEQ ID NO: 532025 - RNA, 32 nt, Human
uguuucuguuauuguuuugaagaagguagcuc

SEQ ID NO: 532026 - RNA, 23 nt, Human
uguuucuguuuuaucucauggua

SEQ ID NO: 532027 - RNA, 32 nt, Human
uguuucuuaccuuagccugaaccuucucaggc

SEQ ID NO: 532028 - RNA, 32 nt, Human
uguuucuuagagaaaugccucggaugccgccg

SEQ ID NO: 532029 - RNA, 32 nt, Human
uguuucuuagcucugaccuguacagugaggua

SEQ ID NO: 532030 - RNA, 32 nt, Human
uguuucuuaucaccagcccaucagcccacuga

SEQ ID NO: 532031 - RNA, 32 nt, Human
uguuucuucaacaaaaacugauagagauuuuu

SEQ ID NO: 532032 - RNA, 32 nt, Human
uguuucuucacucaacucagguggcauuuggg

SEQ ID NO: 532033 - RNA, 32 nt, Human
uguuucuuccaauucucucuucugcuugacca

SEQ ID NO: 532034 - RNA, 32 nt, Human
uguuucuucuccuccuuucucucccucuuucc

SEQ ID NO: 532035 - RNA, 32 nt, Human
uguuucuugccucugugccuucaaccugcugc

SEQ ID NO: 532036 - RNA, 32 nt, Human
uguuucuugccuggaguuguagacgggauuuc

SEQ ID NO: 532037 - RNA, 32 nt, Human
uguuucuuggauaggggccagugcagugccau

SEQ ID NO: 532038 - RNA, 32 nt, Human
uguuucuuguucugccugacuggccgcuggcu

SEQ ID NO: 532039 - RNA, 32 nt, Human
uguuucuuuacagagguaccugagggaggaga

SEQ ID NO: 532040 - RNA, 32 nt, Human
uguuucuuucauuccuuguucuagagcuaacc

SEQ ID NO: 532041 - RNA, 32 nt, Human
uguuucuuucuuucuuucacaugacugcccuu

SEQ ID NO: 532042 - RNA, 32 nt, Human
uguuucuuugagauggagucuugcucugucac

SEQ ID NO: 532043 - RNA, 32 nt, Human
uguuucuuuguuccuuucguuugcuuucuuau

SEQ ID NO: 532044 - RNA, 32 nt, Human
uguuugaaagauguucccuuccuucacuguag

SEQ ID NO: 532045 - RNA, 32 nt, Human
uguuugaacccaggagaguggaagagagauug

SEQ ID NO: 532046 - RNA, 32 nt, Human
uguuugaacucucuuauauucucccacuagcc

SEQ ID NO: 532047 - RNA, 32 nt, Human
uguuugaagaggagcagagaggcuggcacuag

SEQ ID NO: 532048 - RNA, 32 nt, Human
uguuugaagcaguuacuaaacucgucaugcug

SEQ ID NO: 532049 - RNA, 32 nt, Human
uguuugaauaauaaaguauggaggagaaggag

SEQ ID NO: 532050 - RNA, 32 nt, Human
uguuugaaugaguuuauauggaaaaaugaacu

SEQ ID NO: 532051 - RNA, 32 nt, Human
uguuugacacuuauagauugaaauuuccuaau

SEQ ID NO: 532052 - RNA, 21 nt, Human
uguuugacauuagccauuuaa

SEQ ID NO: 532053 - RNA, 32 nt, Human
uguuugaccuaguuagauugugguguuuauuc

SEQ ID NO: 532054 - RNA, 32 nt, Human
uguuugaccuguuucacaggcaucuccuuugu

SEQ ID NO: 532055 - RNA, 32 nt, Human
uguuugacgacaaggaggacgugaacuucgac

SEQ ID NO: 532056 - RNA, 32 nt, Human
uguuugacuagaaccacaucuuaugagguccc

SEQ ID NO: 532057 - RNA, 32 nt, Human
uguuugacucaccaucuuuauuuucuguauau

SEQ ID NO: 532058 - RNA, 32 nt, Human
uguuugacuuuugcuuucuaccugacccuagu

SEQ ID NO: 532059 - RNA, 32 nt, Human
uguuugagaaugcaaauguauacuguaagucu

SEQ ID NO: 532060 - RNA, 32 nt, Human
uguuugagacagagucucccucugucacccag

SEQ ID NO: 532061 - RNA, 32 nt, Human
uguuugagacagcaucuugcucugucucccag

SEQ ID NO: 532062 - RNA, 32 nt, Human
uguuugagacagucgcucugucacccaggcug

SEQ ID NO: 532063 - RNA, 32 nt, Human
uguuugagauagagucuugcuaguguugccca

SEQ ID NO: 532064 - RNA, 32 nt, Human
uguuugagcccaacacuuuaauuuauucuuuc

SEQ ID NO: 532065 - RNA, 32 nt, Human
uguuugagcccaggagguugaggcugcaguga

SEQ ID NO: 532066 - RNA, 32 nt, Human
uguuugagcccuggagguugaggcugcaguga

SEQ ID NO: 532067 - RNA, 32 nt, Human
uguuugagcucagacccccacucucauucccc

SEQ ID NO: 532068 - RNA, 32 nt, Human
uguuugaggaaggcacaugaaucagggccauu

SEQ ID NO: 532069 - RNA, 32 nt, Human
uguuugagggaggaggaaggaggaucagaguu

SEQ ID NO: 532070 - RNA, 32 nt, Human
uguuugagggggaaugaccucuaacaucugua

SEQ ID NO: 532071 - RNA, 32 nt, Human
uguuugagugaguggcugagugcagugucuuu

SEQ ID NO: 532072 - RNA, 32 nt, Human
uguuugaguuccaaucuuacauuuuauaccaa

SEQ ID NO: 532073 - RNA, 31 nt, Human
uguuugauacucaguaccuguuuuaagaaaa

SEQ ID NO: 532074 - RNA, 32 nt, Human
uguuugauagcagaagaaaaaguugcagucuc

SEQ ID NO: 532075 - RNA, 32 nt, Human
uguuugaucuguugaccccagcauacugcugu

SEQ ID NO: 532076 - RNA, 32 nt, Human
uguuugauuugcagaggcauggugaggaauuu

SEQ ID NO: 532077 - RNA, 32 nt, Human
uguuugcaagauaggccaaaaugaguacaaaa

SEQ ID NO: 532078 - RNA, 32 nt, Human
uguuugcacagaaacaugcugcaccccaccca

SEQ ID NO: 532079 - RNA, 32 nt, Human
uguuugcacagcuguucuuuguacccuguucc

SEQ ID NO: 532080 - RNA, 32 nt, Human
uguuugcaccugcuggguauggccuuuggggc

SEQ ID NO: 532081 - RNA, 32 nt, Human
uguuugcagaaaccuugucuuauuuagugucu

SEQ ID NO: 532082 - RNA, 31 nt, Human
uguuugcagagagucagggaggcggaaaaga

SEQ ID NO: 532083 - RNA, 32 nt, Human
uguuugcagcauugcacuccagccugggugac

SEQ ID NO: 532084 - RNA, 32 nt, Human
uguuugcagcggcccaacuggccggcagccug

SEQ ID NO: 532085 - RNA, 32 nt, Human
uguuugcagguuuaaauaaaacaguguggugc

SEQ ID NO: 532086 - RNA, 26 nt, Human
uguuugcagugagagugacuugcugu

SEQ ID NO: 532087 - RNA, 32 nt, Human
uguuugcauagugaacagccuugggagggaga

SEQ ID NO: 532088 - RNA, 32 nt, Human
uguuugcaucaaguaauuuucuuuuugacuua

SEQ ID NO: 532089 - RNA, 32 nt, Human
uguuugcaucacugcacuccagccugggcagc

SEQ ID NO: 532090 - RNA, 32 nt, Human
uguuugcauuccaugaagcuuaaauaagaauu

SEQ ID NO: 532091 - RNA, 32 nt, Human
uguuugcauucugcuccucgcuugccugaaaa

SEQ ID NO: 532092 - RNA, 32 nt, Human
uguuugcauuuaagaugacagugagaaaauga

SEQ ID NO: 532093 - RNA, 32 nt, Human
uguuugccaaagaaauuucauuuggcugugaa

SEQ ID NO: 532094 - RNA, 32 nt, Human
uguuugccaagaacccaggucacugcuaagaa

SEQ ID NO: 532095 - RNA, 32 nt, Human
uguuugccaagugccuggcccagagcaagugg

SEQ ID NO: 532096 - RNA, 32 nt, Human
uguuugccagcucaggagcugucuccucucua

SEQ ID NO: 532097 - RNA, 32 nt, Human
uguuugcccagccuguccuuccagagccucac

SEQ ID NO: 532098 - RNA, 32 nt, Human
uguuugcccaucucuucuuaguggaacuuuag

SEQ ID NO: 532099 - RNA, 32 nt, Human
uguuugccgaguggagugggaaaggcauuuug

SEQ ID NO: 532100 - RNA, 32 nt, Human
uguuugccucagcucuggaagcugacuucuga

SEQ ID NO: 532101 - RNA, 32 nt, Human
uguuugccuccaggagaaccuacaggcaagac

SEQ ID NO: 532102 - RNA, 32 nt, Human
uguuugccucucagucuuucauucauagccug

SEQ ID NO: 532103 - RNA, 32 nt, Human
uguuugccucuccuuaacauguccucagcuga

SEQ ID NO: 532104 - RNA, 32 nt, Human
uguuugccucucuugaaaauggcaggugcucu

SEQ ID NO: 532105 - RNA, 32 nt, Human
uguuugccucuuuccuccuccccacucuaccc

SEQ ID NO: 532106 - RNA, 32 nt, Human
uguuugccuggauccaguccugccacaagcca

SEQ ID NO: 532107 - RNA, 32 nt, Human
uguuugccugugugugcguugugaacuucaag

SEQ ID NO: 532108 - RNA, 32 nt, Human
uguuugccuugcagcugagggauuuucacagu

SEQ ID NO: 532109 - RNA, 32 nt, Human
uguuugcggcgaggagaaaggaaggagaggag

SEQ ID NO: 532110 - RNA, 32 nt, Human
uguuugcgugugugugcgugcgcaugugcuuc

SEQ ID NO: 532111 - RNA, 32 nt, Human
uguuugcguugagccuugcagcucuuccagcu

SEQ ID NO: 532112 - RNA, 20 nt, Human
uguuugcuagcugccuccau

SEQ ID NO: 532113 - RNA, 32 nt, Human
uguuugcuauuuauuuuucuccuucacauuuu

SEQ ID NO: 532114 - RNA, 32 nt, Human
uguuugcucccggagcucugcgggcacccgga

SEQ ID NO: 532115 - RNA, 32 nt, Human
uguuugcugcaagcagaauauuuuggggagag

SEQ ID NO: 532116 - RNA, 32 nt, Human
uguuugcugggagcuucucugcugcuuaaauu

SEQ ID NO: 532117 - RNA, 32 nt, Human
uguuugcuuccacuucccagcagacaugcucu

SEQ ID NO: 532118 - RNA, 32 nt, Human
uguuugcuuccugauuagauccagucaauguu

SEQ ID NO: 532119 - RNA, 32 nt, Human
uguuugcuugagaaaagcaaaaaugcuaacaa

SEQ ID NO: 532120 - RNA, 32 nt, Human
uguuugcuugcaucauggaagcagcauuggaa

SEQ ID NO: 532121 - RNA, 32 nt, Human
uguuugcuuuccggacggaaggacggaaaaag

SEQ ID NO: 532122 - RNA, 32 nt, Human
uguuugcuuugugauaaaauguuaacaaucca

SEQ ID NO: 532123 - RNA, 32 nt, Human
uguuugcuuuucuugaauucaucagaacacaa

SEQ ID NO: 532124 - RNA, 32 nt, Human
uguuugcuuuuggagcucuucagaugcugucc

SEQ ID NO: 532125 - RNA, 32 nt, Human
uguuuggaaagggagagaagagaugucugagg

SEQ ID NO: 532126 - RNA, 32 nt, Human
uguuuggaaauaugguuggaagcacaauucau

SEQ ID NO: 532127 - RNA, 32 nt, Human
uguuuggacaaaaacuacaugaucucaaaaug

SEQ ID NO: 532128 - RNA, 32 nt, Human
uguuuggacccaggagaguggaagagagauug

SEQ ID NO: 532129 - RNA, 32 nt, Human
uguuuggacugagguaccuguacuucuugggu

SEQ ID NO: 532130 - RNA, 32 nt, Human
uguuuggacugcaguuugccacccugagaaca

SEQ ID NO: 532131 - RNA, 32 nt, Human
uguuuggacuucuuccugugccagguccaagu

SEQ ID NO: 532132 - RNA, 32 nt, Human
uguuuggagauucuguuuuacucugccuagag

SEQ ID NO: 532133 - RNA, 32 nt, Human
uguuuggagcauugcugcccagaagcuucuau

SEQ ID NO: 532134 - RNA, 32 nt, Human
uguuuggagcuggugaccuugggcccagcaca

SEQ ID NO: 532135 - RNA, 32 nt, Human
uguuuggaggcuggaugggauaugaucacugg

SEQ ID NO: 532136 - RNA, 32 nt, Human
uguuuggaugauaccugcucuuuauuucagga

SEQ ID NO: 532137 - RNA, 32 nt, Human
uguuuggcaaugugcuguuaaaguaauagacu

SEQ ID NO: 532138 - RNA, 32 nt, Human
uguuuggcaggaccuucccaucugggauccau

SEQ ID NO: 532139 - RNA, 32 nt, Human
uguuuggcagguuaccgauggggaagauucuu

SEQ ID NO: 532140 - RNA, 32 nt, Human
uguuuggcauguaaauguaaacucagcaucaa

SEQ ID NO: 532141 - RNA, 32 nt, Human
uguuuggcgagagagcgauggugccgugggga

SEQ ID NO: 532142 - RNA, 32 nt, Human
uguuuggcggcccuuuuuguucccaucaucua

SEQ ID NO: 532143 - RNA, 32 nt, Human
uguuuggcguugcacacacacauccaccggug

SEQ ID NO: 532144 - RNA, 32 nt, Human
uguuuggcuuaaacgucaaaagccgugacaau

SEQ ID NO: 532145 - RNA, 32 nt, Human
uguuugggagaaugcacaggccagucaggaga

SEQ ID NO: 532146 - RNA, 32 nt, Human
uguuugggauacaaagggguaaguguccccuc

SEQ ID NO: 532147 - RNA, 32 nt, Human
uguuugggauuuccuuuucuuucuuuccuuuu

SEQ ID NO: 532148 - RNA, 32 nt, Human
uguuugggcauggaggcuugccccagaugggg

SEQ ID NO: 532149 - RNA, 32 nt, Human
uguuugggcuaguggguuucugacagcccaug

SEQ ID NO: 532150 - RNA, 32 nt, Human
uguuugggcuucaagcacugucuuccaucugc

SEQ ID NO: 532151 - RNA, 32 nt, Human
uguuugggcuuccuaaugauucuuggaggagg

SEQ ID NO: 532152 - RNA, 32 nt, Human
uguuuggggcaguggggagcaaaccuagauaa

SEQ ID NO: 532153 - RNA, 31 nt, Human
uguuuggggucagucaguguuggagagccca

SEQ ID NO: 532154 - RNA, 32 nt, Human
uguuuggggucccuuggccccuccaguuuccc

SEQ ID NO: 532155 - RNA, 32 nt, Human
uguuuggguacuguauaugagaucaggaaaaa

SEQ ID NO: 532156 - RNA, 32 nt, Human
uguuuggguagaucggaaugaguuguugagcu

SEQ ID NO: 532157 - RNA, 32 nt, Human
uguuugggugggaagggaagagagggauaaga

SEQ ID NO: 532158 - RNA, 32 nt, Human
uguuuggguuuguaaaauaaagugagauagca

SEQ ID NO: 532159 - RNA, 31 nt, Human
uguuugguauuuuucugacaaaauuaagaaa

SEQ ID NO: 532160 - RNA, 32 nt, Human
uguuuggucauugaggguuuguuuguguuuuc

SEQ ID NO: 532161 - RNA, 23 nt, Human
uguuuggucuuuaggccugcgga

SEQ ID NO: 532162 - RNA, 32 nt, Human
uguuuggugaccuacuucacugaccugugagg

SEQ ID NO: 532163 - RNA, 22 nt, Human
uguuuggugcagacacugugga

SEQ ID NO: 532164 - RNA, 32 nt, Human
uguuuggugcaucuugaccugggaagacgccu

SEQ ID NO: 532165 - RNA, 32 nt, Human
uguuugguuucuccaaaguucccaccauaaaa

SEQ ID NO: 532166 - RNA, 32 nt, Human
uguuuguaaccagaagcuuuaaaccagcagag

SEQ ID NO: 532167 - RNA, 32 nt, Human
uguuuguaauuucacuuucaucuugcuuaaua

SEQ ID NO: 532168 - RNA, 31 nt, Human
uguuuguacagcuagaauauauuaguaagau

SEQ ID NO: 532169 - RNA, 32 nt, Human
uguuuguacauacuuauuuccuagcucugucu

SEQ ID NO: 532170 - RNA, 32 nt, Human
uguuuguagagagaaagccaggagguaagagc

SEQ ID NO: 532171 - RNA, 32 nt, Human
uguuuguagcaguuguuugucucauuuuugcu

SEQ ID NO: 532172 - RNA, 32 nt, Human
uguuuguauacguguucacagggcacggaaaa

SEQ ID NO: 532173 - RNA, 32 nt, Human
uguuuguauuuuuagcagagaugggguuucac

SEQ ID NO: 532174 - RNA, 32 nt, Human
uguuuguauuuuuaguagagacaggguuucac

SEQ ID NO: 532175 - RNA, 32 nt, Human
uguuuguauuuuuaguagagacaggguuucau

SEQ ID NO: 532176 - RNA, 32 nt, Human
uguuugucaaauaccacaguauuuuauucauu

SEQ ID NO: 532177 - RNA, 32 nt, Human
uguuugucaccucauauuuaaagcuuuguuuu

SEQ ID NO: 532178 - RNA, 32 nt, Human
uguuugucaccucccuacuccugucauuacau

SEQ ID NO: 532179 - RNA, 32 nt, Human
uguuugucauguauugguacaagcagauacag

SEQ ID NO: 532180 - RNA, 32 nt, Human
uguuugucauucuuaucuccagccugggaaaa

SEQ ID NO: 532181 - RNA, 32 nt, Human
uguuugucccaacaaccucuggccccagcacc

SEQ ID NO: 532182 - RNA, 23 nt, Human
uguuugucccuggacuggccaug

SEQ ID NO: 532183 - RNA, 32 nt, Human
uguuugucuacugcacaagccucggccugccc

SEQ ID NO: 532184 - RNA, 32 nt, Human
uguuugucuccuccuccuccugcuuccccugc

SEQ ID NO: 532185 - RNA, 22 nt, Human
uguuugucuguauuugcacaug

SEQ ID NO: 532186 - RNA, 32 nt, Human
uguuugucuuccauuccauuguuuugaaacuc

SEQ ID NO: 532187 - RNA, 32 nt, Human
uguuugugacaacuaaacaaggcauucagcag

SEQ ID NO: 532188 - RNA, 32 nt, Human
uguuugugauggucucugguucuugaacagcc

SEQ ID NO: 532189 - RNA, 32 nt, Human
uguuugugauugucugugugucugucuccccc

SEQ ID NO: 532190 - RNA, 32 nt, Human
uguuugugccuuucaaaaguacugggggcaga

SEQ ID NO: 532191 - RNA, 32 nt, Human
uguuugugcugguagugguggcaguggugaug

SEQ ID NO: 532192 - RNA, 32 nt, Human
uguuuguggaaaaugaguaaauucagccucaa

SEQ ID NO: 532193 - RNA, 32 nt, Human
uguuuguguaacaaacaggucuuuuggcuuau

SEQ ID NO: 532194 - RNA, 32 nt, Human
uguuugugucccacccuucacccccaaauucc

SEQ ID NO: 532195 - RNA, 32 nt, Human
uguuugugucugcagaagcgcccaucugauau

SEQ ID NO: 532196 - RNA, 29 nt, Human
uguuugugucugucugugggucucgaagg

SEQ ID NO: 532197 - RNA, 29 nt, Human
uguuugugucugugcugcguuugugagcu

SEQ ID NO: 532198 - RNA, 32 nt, Human
uguuuguguggacuccaccaucauguugaauu

SEQ ID NO: 532199 - RNA, 32 nt, Human
uguuuguguguagagacgggggauagugagaa

SEQ ID NO: 532200 - RNA, 32 nt, Human
uguuuguuaaugaugucuucaguucugguacc

SEQ ID NO: 532201 - RNA, 32 nt, Human
uguuuguuauccuuucucuguggcagugaaga

SEQ ID NO: 532202 - RNA, 32 nt, Human
uguuuguucaaagaacaguggaagagaagcau

SEQ ID NO: 532203 - RNA, 32 nt, Human
uguuuguucagacagucuguucuuuuguaaac

SEQ ID NO: 532204 - RNA, 32 nt, Human
uguuuguucaucaccuacuaugugucaggcuc

SEQ ID NO: 532205 - RNA, 25 nt, Human
uguuuguuccaaaaccaucauuuaa

SEQ ID NO: 532206 - RNA, 32 nt, Human
uguuuguugaaugcugcugcccaacucuuccu

SEQ ID NO: 532207 - RNA, 32 nt, Human
uguuuguuggcagacagggucucacuuuguca

SEQ ID NO: 532208 - RNA, 21 nt, Human
uguuuguugugucuugcuaua

SEQ ID NO: 532209 - RNA, 23 nt, Human
uguuuguuucaaucugcuuuuga

SEQ ID NO: 532210 - RNA, 24 nt, Human
uguuuguuucaauuggccauuuaa

SEQ ID NO: 532211 - RNA, 24 nt, Human
uguuuguuucaauugggcacuuaa

SEQ ID NO: 532212 - RNA, 32 nt, Human
uguuuguuucauuugccuuggagccaaaguuu

SEQ ID NO: 532213 - RNA, 32 nt, Human
uguuuguuucuguuauguuaccauaauuugau

SEQ ID NO: 532214 - RNA, 32 nt, Human
uguuuguuucuuucuuucuuucacaugacugc

SEQ ID NO: 532215 - RNA, 32 nt, Human
uguuuguuugagauggagucucacucugucac

SEQ ID NO: 532216 - RNA, 32 nt, Human
uguuuguuugagauugagucuugcucuuguuu

SEQ ID NO: 532217 - RNA, 26 nt, Human
uguuuguuugcgauggagucucacuc

SEQ ID NO: 532218 - RNA, 20 nt, Human
uguuuguuugguuugccaug

SEQ ID NO: 532219 - RNA, 32 nt, Human
uguuuguuuucagucuuugcacuauauuacca

SEQ ID NO: 532220 - RNA, 32 nt, Human
uguuuguuuucccuuccccauuuccuuccuuc

SEQ ID NO: 532221 - RNA, 32 nt, Human
uguuuguuuucgaaugccuuguuuucauagag

SEQ ID NO: 532222 - RNA, 32 nt, Human
uguuuguuuugccucuucuguuucuuggagga

SEQ ID NO: 532223 - RNA, 32 nt, Human
uguuuguuuuugacacagucucgcuuuguugc

SEQ ID NO: 532224 - RNA, 21 nt, Human
uguuuguuuuugcuuguuaua

SEQ ID NO: 532225 - RNA, 22 nt, Human
uguuuuaaaaaugaacuucucc

SEQ ID NO: 532226 - RNA, 32 nt, Human
uguuuuaaaugauuucuugagaauaagcaaug

SEQ ID NO: 532227 - RNA, 32 nt, Human
uguuuuaacauguaauugugggagaaauugua

SEQ ID NO: 532228 - RNA, 32 nt, Human
uguuuuaacuuagguauggguaaauuuacauc

SEQ ID NO: 532229 - RNA, 32 nt, Human
uguuuuaagcuacagcucuaguucauugugau

SEQ ID NO: 532230 - RNA, 32 nt, Human
uguuuuaagugguauggauauauuuagcauau

SEQ ID NO: 532231 - RNA, 32 nt, Human
uguuuuaauagcuguauaauagcaucugucug

SEQ ID NO: 532232 - RNA, 32 nt, Human
uguuuuaaucccacccuuccauccauaccucu

SEQ ID NO: 532233 - RNA, 32 nt, Human
uguuuuacacagagaaacagguagaccccaca

SEQ ID NO: 532234 - RNA, 32 nt, Human
uguuuuacagcagaggaaagaggaucacagag

SEQ ID NO: 532235 - RNA, 32 nt, Human
uguuuuacaguuuuuccagccauucuuuucuu

SEQ ID NO: 532236 - RNA, 32 nt, Human
uguuuuacccuauacauccacaggguuuugac

SEQ ID NO: 532237 - RNA, 32 nt, Human
uguuuuagaagaggcagaacagugauaaagac

SEQ ID NO: 532238 - RNA, 19 nt, Human
uguuuuagacuccuucccc

SEQ ID NO: 532239 - RNA, 18 nt, Human
uguuuuagagacuacaaa

SEQ ID NO: 532240 - RNA, 23 nt, Human
uguuuuagagaucauccgaggac

SEQ ID NO: 532241 - RNA, 32 nt, Human
uguuuuagcaagcauuaaagcaaauguauggc

SEQ ID NO: 532242 - RNA, 32 nt, Human
uguuuuaguacaaauauccagggacaaacucu

SEQ ID NO: 532243 - RNA, 32 nt, Human
uguuuuaguagagguggggucuugccacauug

SEQ ID NO: 532244 - RNA, 32 nt, Human
uguuuuagucucuugauuuuguauccacuuuc

SEQ ID NO: 532245 - RNA, 31 nt, Human
uguuuuauacucaguaccuguuuuaagaaaa

SEQ ID NO: 532246 - RNA, 32 nt, Human
uguuuuauacuucuaugcuauauuuugcuauu

SEQ ID NO: 532247 - RNA, 32 nt, Human
uguuuuauagaacguuuccgcugcaguaagcc

SEQ ID NO: 532248 - RNA, 32 nt, Human
uguuuuaucuuuuccagaugugaauggaauca

SEQ ID NO: 532249 - RNA, 32 nt, Human
uguuuuaugagacuugcugggagcucugcuuu

SEQ ID NO: 532250 - RNA, 32 nt, Human
uguuuuauuaacaucagacaucuuuguuccua

SEQ ID NO: 532251 - RNA, 32 nt, Human
uguuuuauuaccuguugcagaagcgguuaucu

SEQ ID NO: 532252 - RNA, 32 nt, Human
uguuuuauugaaugagcuauaagacaacauuu

SEQ ID NO: 532253 - RNA, 32 nt, Human
uguuuuauugauuucaaggaagugguuaauca

SEQ ID NO: 532254 - RNA, 32 nt, Human
uguuuuauuucaccuaaaauguuagcauuauc

SEQ ID NO: 532255 - RNA, 32 nt, Human
uguuuuauuuuccugugagucuugcgaggugg

SEQ ID NO: 532256 - RNA, 24 nt, Human
uguuuucaaaagugccuugccaug

SEQ ID NO: 532257 - RNA, 32 nt, Human
uguuuucaaaggcuuugcacuggagaagauau

SEQ ID NO: 532258 - RNA, 19 nt, Human
uguuuucaagaccaucaca

SEQ ID NO: 532259 - RNA, 32 nt, Human
uguuuucacauccuuucccuuacccaccuuca

SEQ ID NO: 532260 - RNA, 32 nt, Human
uguuuucacaucuuucauuagauguguguaag

SEQ ID NO: 532261 - RNA, 32 nt, Human
uguuuucacugcacauuuucaggcuugguuuc

SEQ ID NO: 532262 - RNA, 32 nt, Human
uguuuucacuggguuccaccagucccagcaaa

SEQ ID NO: 532263 - RNA, 32 nt, Human
uguuuucagaaaugagggcagcuguuaauuuu

SEQ ID NO: 532264 - RNA, 32 nt, Human
uguuuucagaauuacagugagcacagaggugu

SEQ ID NO: 532265 - RNA, 32 nt, Human
uguuuucaguaucaucuggcacacaacugucc

SEQ ID NO: 532266 - RNA, 32 nt, Human
uguuuucagugcugugucauuccaaauaaacc

SEQ ID NO: 532267 - RNA, 32 nt, Human
uguuuucaguuauauuacuuuugaggcuggug

SEQ ID NO: 532268 - RNA, 32 nt, Human
uguuuucaucuauuuggguacgaagugugcaa

SEQ ID NO: 532269 - RNA, 32 nt, Human
uguuuucauucucccccucucucccuccugug

SEQ ID NO: 532270 - RNA, 32 nt, Human
uguuuucauuucugaaguuuaagaugccuuga

SEQ ID NO: 532271 - RNA, 22 nt, Human
uguuuuccaaggcuuccuccac

SEQ ID NO: 532272 - RNA, 32 nt, Human
uguuuuccaauugaucgagguggagaauguuu

SEQ ID NO: 532273 - RNA, 32 nt, Human
uguuuuccacuagucacuacugucuucuccuu

SEQ ID NO: 532274 - RNA, 32 nt, Human
uguuuuccacugaagcaugcacaugccacugu

SEQ ID NO: 532275 - RNA, 32 nt, Human
uguuuuccagccugggcaauacagugagaccc

SEQ ID NO: 532276 - RNA, 32 nt, Human
uguuuuccaugguuuugacauucuuuggacug

SEQ ID NO: 532277 - RNA, 32 nt, Human
uguuuucccccacucucucuccaccuccuccu

SEQ ID NO: 532278 - RNA, 32 nt, Human
uguuuuccgaacccaucuccuuccgcucuccc

SEQ ID NO: 532279 - RNA, 32 nt, Human
uguuuuccuagaguguuuguuaucaugaacau

SEQ ID NO: 532280 - RNA, 32 nt, Human
uguuuuccuccccucuguguacucccuuaaau

SEQ ID NO: 532281 - RNA, 32 nt, Human
uguuuuccucccucuccucuggcugcuacaac

SEQ ID NO: 532282 - RNA, 32 nt, Human
uguuuuccugcagcuguugacuuguugcccug

SEQ ID NO: 532283 - RNA, 32 nt, Human
uguuuuccugggugaagacuucugggggcaga

SEQ ID NO: 532284 - RNA, 32 nt, Human
uguuuuccugucuuuugacauuugacuuugca

SEQ ID NO: 532285 - RNA, 32 nt, Human
uguuuuccuguuccuguucacuccugcuggaa

SEQ ID NO: 532286 - RNA, 32 nt, Human
uguuuucguucuguuuuauuuuucuaacucug

SEQ ID NO: 532287 - RNA, 32 nt, Human
uguuuucuacugcaaaccuccacauccuggaa

SEQ ID NO: 532288 - RNA, 32 nt, Human
uguuuucucacagcagcugccugggugaagca

SEQ ID NO: 532289 - RNA, 21 nt, Human
uguuuucucccacugccucca

SEQ ID NO: 532290 - RNA, 32 nt, Human
uguuuucucccauguuccauguuuccgauuua

SEQ ID NO: 532291 - RNA, 32 nt, Human
uguuuucuccccagucaucuuauuuggcuaug

SEQ ID NO: 532292 - RNA, 32 nt, Human
uguuuucucugccuggcucucucuuccccucc

SEQ ID NO: 532293 - RNA, 32 nt, Human
uguuuucucuguucucuuucuggaacuccuuu

SEQ ID NO: 532294 - RNA, 32 nt, Human
uguuuucucuucccaaagcuugcucaggcccc

SEQ ID NO: 532295 - RNA, 32 nt, Human
uguuuucugaaaccaggaugaugcucauucag

SEQ ID NO: 532296 - RNA, 32 nt, Human
uguuuucugaagaagggucuucaguauucagc

SEQ ID NO: 532297 - RNA, 32 nt, Human
uguuuucugcaaggagcugccagccaucuaac

SEQ ID NO: 532298 - RNA, 32 nt, Human
uguuuucuggcaggugcccuccuuggaaacug

SEQ ID NO: 532299 - RNA, 32 nt, Human
uguuuucuggguuagaagcuauucgaaaaguc

SEQ ID NO: 532300 - RNA, 32 nt, Human
uguuuucuguaaccccuguuugugguacgaga

SEQ ID NO: 532301 - RNA, 32 nt, Human
uguuuucugucuucaugagucaaaauuugaag

SEQ ID NO: 532302 - RNA, 32 nt, Human
uguuuucuuaguuucauaauaaucugcacugu

SEQ ID NO: 532303 - RNA, 32 nt, Human
uguuuucuucccuccaccuccaccccuuucuu

SEQ ID NO: 532304 - RNA, 32 nt, Human
uguuuucuucuuuucuuacugcgcauuuccau

SEQ ID NO: 532305 - RNA, 32 nt, Human
uguuuucuucuuuuuguucuuuuugcuuauau

SEQ ID NO: 532306 - RNA, 19 nt, Human
uguuuucuugacuaugucu

SEQ ID NO: 532307 - RNA, 32 nt, Human
uguuuucuuuaccuuuuuccuccaugcaccau

SEQ ID NO: 532308 - RNA, 32 nt, Human
uguuuucuuuuccccucuucuuuuucacaaau

SEQ ID NO: 532309 - RNA, 32 nt, Human
uguuuucuuuucugugguugcagccugaccaa

SEQ ID NO: 532310 - RNA, 32 nt, Human
uguuuucuuuucuuccccuuguguuuccaguc

SEQ ID NO: 532311 - RNA, 25 nt, Human
uguuuugaaaauauucacuaacaua

SEQ ID NO: 532312 - RNA, 32 nt, Human
uguuuugaaagaauagaacacaguuuguagug

SEQ ID NO: 532313 - RNA, 32 nt, Human
uguuuugaagaaagaagaguagaagaaaaagu

SEQ ID NO: 532314 - RNA, 32 nt, Human
uguuuugaagcagcagguccaggucacuuugu

SEQ ID NO: 532315 - RNA, 32 nt, Human
uguuuugaaggagaggacagugugucuggcca

SEQ ID NO: 532316 - RNA, 32 nt, Human
uguuuugagacagggccucacucuguugccca

SEQ ID NO: 532317 - RNA, 32 nt, Human
uguuuugagacagggucucacucuguugccca

SEQ ID NO: 532318 - RNA, 32 nt, Human
uguuuugagacagggucucacuguguccccca

SEQ ID NO: 532319 - RNA, 32 nt, Human
uguuuugagacagggucucacuuugucaccca

SEQ ID NO: 532320 - RNA, 32 nt, Human
uguuuugagacagggucucauucugaugccca

SEQ ID NO: 532321 - RNA, 32 nt, Human
uguuuugagacagggucuugcccuguugccca

SEQ ID NO: 532322 - RNA, 32 nt, Human
uguuuugagaggaggagggaagagaaauaaac

SEQ ID NO: 532323 - RNA, 32 nt, Human
uguuuugagauggagucucacucugucaccca

SEQ ID NO: 532324 - RNA, 32 nt, Human
uguuuugagauggagucucgcucugucaccca

SEQ ID NO: 532325 - RNA, 32 nt, Human
uguuuugagauggagucuugcccugucaccca

SEQ ID NO: 532326 - RNA, 32 nt, Human
uguuuugagauggagucuuguucugucaccca

SEQ ID NO: 532327 - RNA, 32 nt, Human
uguuuugagauggaguuuugcucuugcacucc

SEQ ID NO: 532328 - RNA, 32 nt, Human
uguuuugaggcagcaugguuugauuagcauuu

SEQ ID NO: 532329 - RNA, 32 nt, Human
uguuuugaggcagggucucgcucugucaccga

SEQ ID NO: 532330 - RNA, 32 nt, Human
uguuuugaggguggaaugaggugaagggcaag

SEQ ID NO: 532331 - RNA, 32 nt, Human
uguuuugaucacugcugcuugagccccgcuau

SEQ ID NO: 532332 - RNA, 32 nt, Human
uguuuugaugcuuagauuauguucuguuaaug

SEQ ID NO: 532333 - RNA, 32 nt, Human
uguuuugcaaaucaggagguugggcuagauca

SEQ ID NO: 532334 - RNA, 32 nt, Human
uguuuugcacugacagugggaggggauaaggu

SEQ ID NO: 532335 - RNA, 32 nt, Human
uguuuugcagcccaggcuggagugcaguggca

SEQ ID NO: 532336 - RNA, 32 nt, Human
uguuuugcaguggugacuggccuaggcagguu

SEQ ID NO: 532337 - RNA, 32 nt, Human
uguuuugcaucaagcuggaguacuggauggaa

SEQ ID NO: 532338 - RNA, 32 nt, Human
uguuuugccauguuggccaggcuggucucgaa

SEQ ID NO: 532339 - RNA, 32 nt, Human
uguuuugccauguuggccaggcuggucuugaa

SEQ ID NO: 532340 - RNA, 32 nt, Human
uguuuugccugaaguuggagugaguguggcuc

SEQ ID NO: 532341 - RNA, 32 nt, Human
uguuuugcucccgucuccgacgagagaggcgg

SEQ ID NO: 532342 - RNA, 32 nt, Human
uguuuugcugggaagauagaccuggguggagg

SEQ ID NO: 532343 - RNA, 32 nt, Human
uguuuuggagcuucaagacuuugcauuuccua

SEQ ID NO: 532344 - RNA, 32 nt, Human
uguuuuggagugaaaggagcuugaaggucaug

SEQ ID NO: 532345 - RNA, 32 nt, Human
uguuuuggauagaaagccccuuuugcucagua

SEQ ID NO: 532346 - RNA, 32 nt, Human
uguuuuggcaccugccuguaaucucagcuacu

SEQ ID NO: 532347 - RNA, 32 nt, Human
uguuuuggccacuucuguuggccaugaguguc

SEQ ID NO: 532348 - RNA, 32 nt, Human
uguuuuggcucccaaucagcagucuucaaucg

SEQ ID NO: 532349 - RNA, 32 nt, Human
uguuuuggcugcagagagugguucauccauac

SEQ ID NO: 532350 - RNA, 32 nt, Human
uguuuuggcugcagcggugucuggggugaugu

SEQ ID NO: 532351 - RNA, 32 nt, Human
uguuuugggcuucuuguaaauccccaguuccu

SEQ ID NO: 532352 - RNA, 32 nt, Human
uguuuuggggaagugaaauaugugguugguag

SEQ ID NO: 532353 - RNA, 32 nt, Human
uguuuuggggaccagguagggaggcuguugaa

SEQ ID NO: 532354 - RNA, 32 nt, Human
uguuuuggggucuuaggguacagcccaggcgg

SEQ ID NO: 532355 - RNA, 32 nt, Human
uguuuugggugagacagagggaaagggaaaaa

SEQ ID NO: 532356 - RNA, 32 nt, Human
uguuuuggguuagagagaguaagauuugagaa

SEQ ID NO: 532357 - RNA, 32 nt, Human
uguuuugguggcagaggugggaugagcuggaa

SEQ ID NO: 532358 - RNA, 22 nt, Human
uguuuugguggcauccaaagac

SEQ ID NO: 532359 - RNA, 28 nt, Human
uguuuuguaagugcugcuauaucuaucc

SEQ ID NO: 532360 - RNA, 32 nt, Human
uguuuuguacagugccuggcacucugggugcu

SEQ ID NO: 532361 - RNA, 32 nt, Human
uguuuuguacaucuaauuuugggaaaccaagu

SEQ ID NO: 532362 - RNA, 32 nt, Human
uguuuuguaguguugcuuagcacuuugcgcau

SEQ ID NO: 532363 - RNA, 32 nt, Human
uguuuuguauuucucuggagugcaauggugca

SEQ ID NO: 532364 - RNA, 32 nt, Human
uguuuugucacccaggcuggagugcagugggg

SEQ ID NO: 532365 - RNA, 32 nt, Human
uguuuugucacccaggcuggagugcaguggug

SEQ ID NO: 532366 - RNA, 32 nt, Human
uguuuugucauccugagucccagaggggugaa

SEQ ID NO: 532367 - RNA, 21 nt, Human
uguuuugugaauacugacaca

SEQ ID NO: 532368 - RNA, 32 nt, Human
uguuuugugacuggcuucauuuacuuagcaua

SEQ ID NO: 532369 - RNA, 32 nt, Human
uguuuuguggaaauagauguguuugcaauuug

SEQ ID NO: 532370 - RNA, 32 nt, Human
uguuuugugguuuccguauuucuucuuuucac

SEQ ID NO: 532371 - RNA, 32 nt, Human
uguuuuguguaaaaugaaauuacuuucucuug

SEQ ID NO: 532372 - RNA, 32 nt, Human
uguuuuguguguguuuuaauucucaucuauga

SEQ ID NO: 532373 - RNA, 24 nt, Human
uguuuuguuauaaugccugauaca

SEQ ID NO: 532374 - RNA, 32 nt, Human
uguuuuguucaucuguucgagcagaggggcag

SEQ ID NO: 532375 - RNA, 32 nt, Human
uguuuuguucccucugccccagagagcucccc

SEQ ID NO: 532376 - RNA, 32 nt, Human
uguuuuguucuagccacacuggcagcuguuag

SEQ ID NO: 532377 - RNA, 32 nt, Human
uguuuuguucuucagcuccucaucaggaucuu

SEQ ID NO: 532378 - RNA, 32 nt, Human
uguuuuguucuuuguuaugcugucuaucucug

SEQ ID NO: 532379 - RNA, 23 nt, Human
uguuuuguugacauucugaaugc

SEQ ID NO: 532380 - RNA, 32 nt, Human
uguuuuguugagauggaguuuugcucuuauug

SEQ ID NO: 532381 - RNA, 32 nt, Human
uguuuuguugucuugugcaguauuuuacagcc

SEQ ID NO: 532382 - RNA, 32 nt, Human
uguuuuguuugucauguauugguacaagcaga

SEQ ID NO: 532383 - RNA, 32 nt, Human
uguuuuguuuuguuuuuaauguauguagcaga

SEQ ID NO: 532384 - RNA, 32 nt, Human
uguuuuguuuuucugcugaaugccugcuccca

SEQ ID NO: 532385 - RNA, 32 nt, Human
uguuuuuaaacccaaaacauuuagugguccgu

SEQ ID NO: 532386 - RNA, 32 nt, Human
uguuuuuaaagaaaggaaaugugcaauauuga

SEQ ID NO: 532387 - RNA, 32 nt, Human
uguuuuuaagagauagggucuugcuguguugc

SEQ ID NO: 532388 - RNA, 32 nt, Human
uguuuuuaagagauggagucucucacucugug

SEQ ID NO: 532389 - RNA, 32 nt, Human
uguuuuuacugucuuuucccagacacacagug

SEQ ID NO: 532390 - RNA, 32 nt, Human
uguuuuuagaguaugauucagagaccaauuua

SEQ ID NO: 532391 - RNA, 32 nt, Human
uguuuuuagaucagugcuucaacauccaggcu

SEQ ID NO: 532392 - RNA, 32 nt, Human
uguuuuuagcuauuucuccacuuguaaugugu

SEQ ID NO: 532393 - RNA, 31 nt, Human
uguuuuuauaaaucagggccuguguucauac

SEQ ID NO: 532394 - RNA, 31 nt, Human
uguuuuuauacuucucaauuuaaauuuucuu

SEQ ID NO: 532395 - RNA, 32 nt, Human
uguuuuuaugaugugcauggacucauugaagu

SEQ ID NO: 532396 - RNA, 32 nt, Human
uguuuuuauguuauuagcuauuuggaguuaaa

SEQ ID NO: 532397 - RNA, 32 nt, Human
uguuuuuauucgcuuucugguaacuucuguag

SEQ ID NO: 532398 - RNA, 32 nt, Human
uguuuuucaaaccuccugcuucucccaccuug

SEQ ID NO: 532399 - RNA, 29 nt, Human
uguuuuucaauaaaaccagaguugaaggc

SEQ ID NO: 532400 - RNA, 31 nt, Human
uguuuuucaauaaauauuuugaaacauguuu

SEQ ID NO: 532401 - RNA, 32 nt, Human
uguuuuucaaugauaggaaacagaaaagccaa

SEQ ID NO: 532402 - RNA, 32 nt, Human
uguuuuucacaucuauacucccugcacccuuc

SEQ ID NO: 532403 - RNA, 32 nt, Human
uguuuuucacugcaccucuuuggaucaugauu

SEQ ID NO: 532404 - RNA, 32 nt, Human
uguuuuucagaaagggcagaagugggggaaga

SEQ ID NO: 532405 - RNA, 32 nt, Human
uguuuuucagauuccuuucacugccuuaaucu

SEQ ID NO: 532406 - RNA, 32 nt, Human
uguuuuucaggccauucaccugccuccuguca

SEQ ID NO: 532407 - RNA, 32 nt, Human
uguuuuucaguaggcuucaauuacaaacaguu

SEQ ID NO: 532408 - RNA, 32 nt, Human
uguuuuucaguuacuuuauauuuauuuuguau

SEQ ID NO: 532409 - RNA, 19 nt, Human
uguuuuucaucucuuccuc

SEQ ID NO: 532410 - RNA, 21 nt, Human
uguuuuuccagacucagcuca

SEQ ID NO: 532411 - RNA, 25 nt, Human
uguuuuuccagcucacccacugcca

SEQ ID NO: 532412 - RNA, 32 nt, Human
uguuuuuccgacacuccugggucagacuccug

SEQ ID NO: 532413 - RNA, 32 nt, Human
uguuuuucuacaacacagaguacugacucugc

SEQ ID NO: 532414 - RNA, 32 nt, Human
uguuuuucuagagugaauuauaguauugacgu

SEQ ID NO: 532415 - RNA, 32 nt, Human
uguuuuucuauuggagacaaaaugaacaucgu

SEQ ID NO: 532416 - RNA, 32 nt, Human
uguuuuucuccuagucccucuccugccaccuc

SEQ ID NO: 532417 - RNA, 32 nt, Human
uguuuuucugucaccuauagagugcaagaaug

SEQ ID NO: 532418 - RNA, 31 nt, Human
uguuuuucuguguaugggccuggucagugua

SEQ ID NO: 532419 - RNA, 23 nt, Human
uguuuuucuguguuguuuucccu

SEQ ID NO: 532420 - RNA, 32 nt, Human
uguuuuucuuuaaaguuucaacaacaaacccc

SEQ ID NO: 532421 - RNA, 24 nt, Human
uguuuuucuuucuguagcauggca

SEQ ID NO: 532422 - RNA, 32 nt, Human
uguuuuucuuuucuaaaaugaagugagauugu

SEQ ID NO: 532423 - RNA, 32 nt, Human
uguuuuugaacagcauaauuguguagcagcac

SEQ ID NO: 532424 - RNA, 32 nt, Human
uguuuuugauccagggagguugaagugucuau

SEQ ID NO: 532425 - RNA, 22 nt, Human
uguuuuugauccucccaccuca

SEQ ID NO: 532426 - RNA, 32 nt, Human
uguuuuugcacccuuuuucaaguacaaaaucg

SEQ ID NO: 532427 - RNA, 32 nt, Human
uguuuuugccuaguuuuucgccaaucuacacu

SEQ ID NO: 532428 - RNA, 32 nt, Human
uguuuuugccuuuguugguucauccuuguuuu

SEQ ID NO: 532429 - RNA, 32 nt, Human
uguuuuugcuccucccucuuuacccuccccuc

SEQ ID NO: 532430 - RNA, 32 nt, Human
uguuuuugcugcagauaaucggccagagacug

SEQ ID NO: 532431 - RNA, 32 nt, Human
uguuuuugcugcucuagcaagaucccugagac

SEQ ID NO: 532432 - RNA, 32 nt, Human
uguuuuugcuucccauguaacuucuccagugu

SEQ ID NO: 532433 - RNA, 32 nt, Human
uguuuuugcuuuccccuuccuccucccucucu

SEQ ID NO: 532434 - RNA, 32 nt, Human
uguuuuuggagggaaucagugggacuauuugu

SEQ ID NO: 532435 - RNA, 32 nt, Human
uguuuuuggagugcuggagugacuugugaauu

SEQ ID NO: 532436 - RNA, 32 nt, Human
uguuuuuggcauuucgagguuuacuuauuuuc

SEQ ID NO: 532437 - RNA, 32 nt, Human
uguuuuuggggaaauuuugaaaaguggaguug

SEQ ID NO: 532438 - RNA, 32 nt, Human
uguuuuugggggaacagggagcauucacaggg

SEQ ID NO: 532439 - RNA, 31 nt, Human
uguuuuuggguucucccucuuugccuaggcu

SEQ ID NO: 532440 - RNA, 32 nt, Human
uguuuuuggucagaauagauaaccucaagcuu

SEQ ID NO: 532441 - RNA, 32 nt, Human
uguuuuuggugguuugggggaugggaggguug

SEQ ID NO: 532442 - RNA, 32 nt, Human
uguuuuugguuuuucuaaauauccaauugguc

SEQ ID NO: 532443 - RNA, 32 nt, Human
uguuuuugucugacuucuacucugucaaucuc

SEQ ID NO: 532444 - RNA, 32 nt, Human
uguuuuuguguuacugggcaugugccccuuua

SEQ ID NO: 532445 - RNA, 32 nt, Human
uguuuuuguuauuaaauggaaaaggccugaau

SEQ ID NO: 532446 - RNA, 22 nt, Human
uguuuuuguucuacucuaggca

SEQ ID NO: 532447 - RNA, 32 nt, Human
uguuuuuguugguaggcgucucgcucugucac

SEQ ID NO: 532448 - RNA, 32 nt, Human
uguuuuuguuuucucuuccaagggccgucccg

SEQ ID NO: 532449 - RNA, 32 nt, Human
uguuuuuguuuugcacaaacuaaaugcagugg

SEQ ID NO: 532450 - RNA, 32 nt, Human
uguuuuuguuuugcacaguaagaaacaauagg

SEQ ID NO: 532451 - RNA, 32 nt, Human
uguuuuuguuuuguuccauuguagcucuuuuu

SEQ ID NO: 532452 - RNA, 21 nt, Human
uuaaaaaacaagauuuauaca

SEQ ID NO: 532453 - RNA, 23 nt, Human
uuaaaaaagauggauuugacaca

SEQ ID NO: 532454 - RNA, 24 nt, Human
uuaaaaaauuguaugauuuacaua

SEQ ID NO: 532455 - RNA, 32 nt, Human
uuaaaaacaaaaccaagcucccuucccuuccu

SEQ ID NO: 532456 - RNA, 32 nt, Human
uuaaaaacaaaugaguuuuuauauaaauaaag

SEQ ID NO: 532457 - RNA, 32 nt, Human
uuaaaaacaacaaagcauuguucuaacuacua

SEQ ID NO: 532458 - RNA, 32 nt, Human
uuaaaaacaacaaauuggccucuuccuaagua

SEQ ID NO: 532459 - RNA, 32 nt, Human
uuaaaaacauaguccugcagguugacuaagaa

SEQ ID NO: 532460 - RNA, 32 nt, Human
uuaaaaacauagugucuucauuagugugcauc

SEQ ID NO: 532461 - RNA, 32 nt, Human
uuaaaaacauugcugccgccuacuucuuccag

SEQ ID NO: 532462 - RNA, 32 nt, Human
uuaaaaaccacuggaacucuuguccaguuuuu

SEQ ID NO: 532463 - RNA, 32 nt, Human
uuaaaaaccccagcugccagagaccccaacac

SEQ ID NO: 532464 - RNA, 32 nt, Human
uuaaaaacucacuguuagugacuuugaugccu

SEQ ID NO: 532465 - RNA, 32 nt, Human
uuaaaaacuggacuuuuuagaaguaaaguaaa

SEQ ID NO: 532466 - RNA, 32 nt, Human
uuaaaaacuguacuguuuuauguuacacauug

SEQ ID NO: 532467 - RNA, 32 nt, Human
uuaaaaacuguucaaaagcaaaagagaaggaa

SEQ ID NO: 532468 - RNA, 32 nt, Human
uuaaaaacuucggaguuuuuccuugcuuaaau

SEQ ID NO: 532469 - RNA, 32 nt, Human
uuaaaaacuucuguaguucuuuuggccagugu

SEQ ID NO: 532470 - RNA, 32 nt, Human
uuaaaaacuuuacuccaaagggagccaaugug

SEQ ID NO: 532471 - RNA, 32 nt, Human
uuaaaaagaaaaauaaaggaccucuggguugu

SEQ ID NO: 532472 - RNA, 32 nt, Human
uuaaaaagaaauucacugguucuuuacaaaau

SEQ ID NO: 532473 - RNA, 32 nt, Human
uuaaaaagaaccucgcuucuuccucacggugc

SEQ ID NO: 532474 - RNA, 32 nt, Human
uuaaaaagaaggcuuacaauuagccaggcgug

SEQ ID NO: 532475 - RNA, 32 nt, Human
uuaaaaagacuugguucagcuggucacggugg

SEQ ID NO: 532476 - RNA, 32 nt, Human
uuaaaaagagcauuaagcuuaaaugaguuuuu

SEQ ID NO: 532477 - RNA, 32 nt, Human
uuaaaaagagugaggaagaagcagaaugauug

SEQ ID NO: 532478 - RNA, 32 nt, Human
uuaaaaagauuuugaaagcuugcucaauaaug

SEQ ID NO: 532479 - RNA, 32 nt, Human
uuaaaaagccauguguggaaacccacuauuua

SEQ ID NO: 532480 - RNA, 32 nt, Human
uuaaaaagcugcacgcaaguguuaaacuucug

SEQ ID NO: 532481 - RNA, 32 nt, Human
uuaaaaaggaaaauaaaggaccucugggcugu

SEQ ID NO: 532482 - RNA, 32 nt, Human
uuaaaaaggaaggaaggagcaagugaaguuuc

SEQ ID NO: 532483 - RNA, 32 nt, Human
uuaaaaaggaagggaaaagucuuuuguugccc

SEQ ID NO: 532484 - RNA, 32 nt, Human
uuaaaaaggacaaugcugauggaagaccagac

SEQ ID NO: 532485 - RNA, 32 nt, Human
uuaaaaaggcaaaaccugaaccaccuucugca

SEQ ID NO: 532486 - RNA, 32 nt, Human
uuaaaaaggcaagaacagguaucagaagacaa

SEQ ID NO: 532487 - RNA, 32 nt, Human
uuaaaaagguauuuacacaacagaucaacauu

SEQ ID NO: 532488 - RNA, 32 nt, Human
uuaaaaauaaauguguauguguguacauauau

SEQ ID NO: 532489 - RNA, 32 nt, Human
uuaaaaauaacuucuuugcugaagugagagga

SEQ ID NO: 532490 - RNA, 32 nt, Human
uuaaaaauacaaaaauuagcuggcuguggugg

SEQ ID NO: 532491 - RNA, 32 nt, Human
uuaaaaauacaaaaauuagcugggcaugaugg

SEQ ID NO: 532492 - RNA, 32 nt, Human
uuaaaaauacaaaaauuagcugggcaugguag

SEQ ID NO: 532493 - RNA, 32 nt, Human
uuaaaaauacaaaaauuagcugggcguggugg

SEQ ID NO: 532494 - RNA, 32 nt, Human
uuaaaaauacaaaaauuagcugggguuggugg

SEQ ID NO: 532495 - RNA, 32 nt, Human
uuaaaaauacaaaaauuagcuggguguggugg

SEQ ID NO: 532496 - RNA, 32 nt, Human
uuaaaaauacaugugcauacuacacacaguau

SEQ ID NO: 532497 - RNA, 32 nt, Human
uuaaaaaucaguuucaaaaaggguguuggagg

SEQ ID NO: 532498 - RNA, 32 nt, Human
uuaaaaaugcagauguuuuacauuugauuucu

SEQ ID NO: 532499 - RNA, 32 nt, Human
uuaaaaauggaagaggaugcaggagucagauu

SEQ ID NO: 532500 - RNA, 32 nt, Human
uuaaaaauuaaagcugcaaaagaaauaaaaug

SEQ ID NO: 532501 - RNA, 32 nt, Human
uuaaaaauuacuggcuaaaaagaaggaaaaug

SEQ ID NO: 532502 - RNA, 32 nt, Human
uuaaaaauuagccaggugugguggcuugugcu

SEQ ID NO: 532503 - RNA, 32 nt, Human
uuaaaaauuagcuugguguggugcccucugcc

SEQ ID NO: 532504 - RNA, 32 nt, Human
uuaaaacaacaacugugacuguuuuaccugug

SEQ ID NO: 532505 - RNA, 32 nt, Human
uuaaaacaaugugaaacaaccugggcaacaug

SEQ ID NO: 532506 - RNA, 32 nt, Human
uuaaaacacauuugaauuuauuucucagcucu

SEQ ID NO: 532507 - RNA, 32 nt, Human
uuaaaacauauauggauguggaaagcacauau

SEQ ID NO: 532508 - RNA, 32 nt, Human
uuaaaacaugaagauuuaggucauguggcauu

SEQ ID NO: 532509 - RNA, 32 nt, Human
uuaaaacaugaggcagccauggguugggagau

SEQ ID NO: 532510 - RNA, 32 nt, Human
uuaaaacaugucuucuuuuucugauucaauac

SEQ ID NO: 532511 - RNA, 32 nt, Human
uuaaaaccaaacccugaacccuuuuaaagaac

SEQ ID NO: 532512 - RNA, 31 nt, Human
uuaaaaccaaauucagagguuggggacuuaa

SEQ ID NO: 532513 - RNA, 32 nt, Human
uuaaaaccaaauucagagguuggggacuuaaa

SEQ ID NO: 532514 - RNA, 32 nt, Human
uuaaaaccagguaccguggucacucaccugau

SEQ ID NO: 532515 - RNA, 32 nt, Human
uuaaaaccuagaggcacaaucuugacuuguca

SEQ ID NO: 532516 - RNA, 32 nt, Human
uuaaaaccucccagcugaccucagacuaggca

SEQ ID NO: 532517 - RNA, 32 nt, Human
uuaaaaccuguaucaucaaacucucucucuaa

SEQ ID NO: 532518 - RNA, 32 nt, Human
uuaaaacgaggagagagaaaaauaauggcaaa

SEQ ID NO: 532519 - RNA, 32 nt, Human
uuaaaacuacauccaacucaucauuuagccuu

SEQ ID NO: 532520 - RNA, 32 nt, Human
uuaaaacuagaacuuggcuauauugaaugugu

SEQ ID NO: 532521 - RNA, 32 nt, Human
uuaaaacuaucucuuuggcuuguguuauccag

SEQ ID NO: 532522 - RNA, 32 nt, Human
uuaaaacucccagggacucuucgcugcugcca

SEQ ID NO: 532523 - RNA, 32 nt, Human
uuaaaacuccuccuugagcacacaccuucucu

SEQ ID NO: 532524 - RNA, 32 nt, Human
uuaaaacuccuucugcgggaaggagagaagga

SEQ ID NO: 532525 - RNA, 19 nt, Human
uuaaaacucuguagucuga

SEQ ID NO: 532526 - RNA, 32 nt, Human
uuaaaacugcaacagcucuuccaggaaagaau

SEQ ID NO: 532527 - RNA, 32 nt, Human
uuaaaacugcaagucuccuacccugggauccc

SEQ ID NO: 532528 - RNA, 32 nt, Human
uuaaaacuggaagacagauucugcugauuuuc

SEQ ID NO: 532529 - RNA, 32 nt, Human
uuaaaacugggcugggagagaagauggggaag

SEQ ID NO: 532530 - RNA, 32 nt, Human
uuaaaacugucagaauucgcuguuauaauuau

SEQ ID NO: 532531 - RNA, 32 nt, Human
uuaaaacuucuuucauucccucuacagaagca

SEQ ID NO: 532532 - RNA, 32 nt, Human
uuaaaacuuuucaccccuugaagaccuuacau

SEQ ID NO: 532533 - RNA, 32 nt, Human
uuaaaagaaaaaucuuaauagcaguguuggcu

SEQ ID NO: 532534 - RNA, 32 nt, Human
uuaaaagaaagccucagagaauugcugauucu

SEQ ID NO: 532535 - RNA, 31 nt, Human
uuaaaagaacaaugacaaacacccacuuauu

SEQ ID NO: 532536 - RNA, 32 nt, Human
uuaaaagaacuccaggaaacaugaauucugga

SEQ ID NO: 532537 - RNA, 32 nt, Human
uuaaaagaaguccaaaaacaucaacacuaagg

SEQ ID NO: 532538 - RNA, 32 nt, Human
uuaaaagaagugaaacuuguagauacagcuag

SEQ ID NO: 532539 - RNA, 32 nt, Human
uuaaaagaagugaaacuuguagauauagcuag

SEQ ID NO: 532540 - RNA, 22 nt, Human
uuaaaagaauguucuuucauua

SEQ ID NO: 532541 - RNA, 32 nt, Human
uuaaaagaauuugaaaccuaauuuauauacaa

SEQ ID NO: 532542 - RNA, 32 nt, Human
uuaaaagacaaugcuauuacuacuucuuauca

SEQ ID NO: 532543 - RNA, 32 nt, Human
uuaaaagacagaggcuccaaaaugauuucagg

SEQ ID NO: 532544 - RNA, 32 nt, Human
uuaaaagacaucuuuccugcauugccaucuac

SEQ ID NO: 532545 - RNA, 31 nt, Human
uuaaaagagagaccuguauuggagaauauuu

SEQ ID NO: 532546 - RNA, 32 nt, Human
uuaaaagagccaagauuccuguuuucaguuug

SEQ ID NO: 532547 - RNA, 32 nt, Human
uuaaaagaggcaaaaauuaaaagcuuggagag

SEQ ID NO: 532548 - RNA, 32 nt, Human
uuaaaagaggccagggcgggcggagggaggcu

SEQ ID NO: 532549 - RNA, 32 nt, Human
uuaaaagaggucucuaacugaagagagaugga

SEQ ID NO: 532550 - RNA, 32 nt, Human
uuaaaagauagggaaugaagaaugcaaaaugg

SEQ ID NO: 532551 - RNA, 32 nt, Human
uuaaaagaugggcguuucccccaaugaaauac

SEQ ID NO: 532552 - RNA, 32 nt, Human
uuaaaagcacaaauacacuacauagagaaagg

SEQ ID NO: 532553 - RNA, 32 nt, Human
uuaaaagcacuuucacaccucuccucgcuucc

SEQ ID NO: 532554 - RNA, 32 nt, Human
uuaaaagcaguucaaguugacaacagcagaaa

SEQ ID NO: 532555 - RNA, 32 nt, Human
uuaaaagccuccaggauuuggugccgaacauc

SEQ ID NO: 532556 - RNA, 32 nt, Human
uuaaaagcuaucaccauuguaguagaaucauc

SEQ ID NO: 532557 - RNA, 32 nt, Human
uuaaaagcuuggagauuacuguauuuggcauu

SEQ ID NO: 532558 - RNA, 32 nt, Human
uuaaaaggcuguaaaccaugggcagauagguu

SEQ ID NO: 532559 - RNA, 32 nt, Human
uuaaaagucagaggcucucacuacacuggguc

SEQ ID NO: 532560 - RNA, 32 nt, Human
uuaaaagucagaggcuuuacuaaucuaccuau

SEQ ID NO: 532561 - RNA, 32 nt, Human
uuaaaagucuaugacaguguaacucuacaguc

SEQ ID NO: 532562 - RNA, 32 nt, Human
uuaaaagucugccuauccuggccagguguggu

SEQ ID NO: 532563 - RNA, 32 nt, Human
uuaaaagucugccuuguuuaugguggaaaauu

SEQ ID NO: 532564 - RNA, 32 nt, Human
uuaaaagugaacauaaauuauagaguggaagg

SEQ ID NO: 532565 - RNA, 32 nt, Human
uuaaaagugccauuaacaaauguaucacuagc

SEQ ID NO: 532566 - RNA, 32 nt, Human
uuaaaaguggcagaacaggaaagacgaauuaa

SEQ ID NO: 532567 - RNA, 32 nt, Human
uuaaaaguuaauagaacugucucucuguaaug

SEQ ID NO: 532568 - RNA, 32 nt, Human
uuaaaaguuagcccggugugguggcgcgcacc

SEQ ID NO: 532569 - RNA, 32 nt, Human
uuaaaaguuauuuauggccugggaaacaauuu

SEQ ID NO: 532570 - RNA, 32 nt, Human
uuaaaauaaaccugcaguuuaacagaauuuug

SEQ ID NO: 532571 - RNA, 32 nt, Human
uuaaaauaagaagugagaaaaacaauguuggg

SEQ ID NO: 532572 - RNA, 32 nt, Human
uuaaaauaagguccuucuugcccacucccucg

SEQ ID NO: 532573 - RNA, 32 nt, Human
uuaaaauacaauacccacagcaucuaacuaaa

SEQ ID NO: 532574 - RNA, 32 nt, Human
uuaaaauagcacaaauuuauuaucuucacaau

SEQ ID NO: 532575 - RNA, 32 nt, Human
uuaaaauaggcaccuuccccucccaggucugg

SEQ ID NO: 532576 - RNA, 32 nt, Human
uuaaaauaguauuuuggcuuuugaaguuauuu

SEQ ID NO: 532577 - RNA, 32 nt, Human
uuaaaauaucuggacugaguuuugccaaaugu

SEQ ID NO: 532578 - RNA, 32 nt, Human
uuaaaauauuuagcugggcacaguggugugca

SEQ ID NO: 532579 - RNA, 32 nt, Human
uuaaaauauuuauccaaaauguaguugacaga

SEQ ID NO: 532580 - RNA, 32 nt, Human
uuaaaaucacauuuuguuugagauggagaucu

SEQ ID NO: 532581 - RNA, 32 nt, Human
uuaaaaucacuuccagcuuacaucuuacacgg

SEQ ID NO: 532582 - RNA, 32 nt, Human
uuaaaaucagccaaaggaggaaaaagauacau

SEQ ID NO: 532583 - RNA, 32 nt, Human
uuagaaggguuucugucaucauggaagaggug

SEQ ID NO: 532584 - RNA, 32 nt, Human
uuagaagguacuugaggaauagagaagacugg

SEQ ID NO: 532585 - RNA, 32 nt, Human
uuagaagguuacugaaagcucugccuuccgga

SEQ ID NO: 532586 - RNA, 32 nt, Human
uuagaaguaggaggcuggacgacuucaccccc

SEQ ID NO: 532587 - RNA, 32 nt, Human
uuagaagucagauccagggagaaagugaacug

SEQ ID NO: 532588 - RNA, 32 nt, Human
uuagaaguuguccucaugaauuagcuagcauu

SEQ ID NO: 532589 - RNA, 32 nt, Human
uuagaauagacuccuggguuguuuuacaaaug

SEQ ID NO: 532590 - RNA, 32 nt, Human
uuagaauaugccacuaacacuaucugccuuuc

SEQ ID NO: 532591 - RNA, 32 nt, Human
uuagaaucgcuuuccuuccuccccuuuugccc

SEQ ID NO: 532592 - RNA, 32 nt, Human
uuagaaugagaauuaaagagaaaacaaaagaa

SEQ ID NO: 532593 - RNA, 32 nt, Human
uuagaauggcuugucccaucagcagaugaaug

SEQ ID NO: 532594 - RNA, 32 nt, Human
uuagaauggugcuucucagcucugcuuaaaug

SEQ ID NO: 532595 - RNA, 32 nt, Human
uuagaauguaugcacacauccauggacacuca

SEQ ID NO: 532596 - RNA, 32 nt, Human
uuagaaugugauuuuuauuccuuuuuauuucu

SEQ ID NO: 532597 - RNA, 32 nt, Human
uuagaaugugauuuuuguuccuuuuuauuuau

SEQ ID NO: 532598 - RNA, 32 nt, Human
uuagaaugugauuuuuguuccuuuuuauuucu

SEQ ID NO: 532599 - RNA, 32 nt, Human
uuagaauguugaggcaguuucccagagaaaca

SEQ ID NO: 532600 - RNA, 32 nt, Human
uuagaauugacaacauaaacuacuuuugcuuu

SEQ ID NO: 532601 - RNA, 32 nt, Human
uuagaauugcccagugcugccagagugaguga

SEQ ID NO: 532602 - RNA, 32 nt, Human
uuagaauuggauuugaagaacucgacuuuaug

SEQ ID NO: 532603 - RNA, 32 nt, Human
uuagaauuugccuguaaaaugaauucuaaaaa

SEQ ID NO: 532604 - RNA, 32 nt, Human
uuagaauuuugcaaaugcuggaauucugccag

SEQ ID NO: 532605 - RNA, 32 nt, Human
uuagacaacugaaacccacugcccuguaaccc

SEQ ID NO: 532606 - RNA, 32 nt, Human
uuagacaagccuuucacaacauuucaucaauu

SEQ ID NO: 532607 - RNA, 32 nt, Human
uuagacaaggucuugcucugucccucaggcug

SEQ ID NO: 532608 - RNA, 32 nt, Human
uuagacaaugauuuuuauuauuauccugcuau

SEQ ID NO: 532609 - RNA, 32 nt, Human
uuagacacccacaaaggcugcucuuuagccuc

SEQ ID NO: 532610 - RNA, 32 nt, Human
uuagacaccugccucugcuccugcccaacgcc

SEQ ID NO: 532611 - RNA, 32 nt, Human
uuagacacuggcccaacuccaggcguuuccuu

SEQ ID NO: 532612 - RNA, 32 nt, Human
uuagacagagucucgcucugucgcccaggcug

SEQ ID NO: 532613 - RNA, 32 nt, Human
uuagacagccaaaggcuggcgagagucuggcc

SEQ ID NO: 532614 - RNA, 32 nt, Human
uuagacagccugauacaggccuguagccucuu

SEQ ID NO: 532615 - RNA, 32 nt, Human
uuagacagccuggugauggaggaugaagaaac

SEQ ID NO: 532616 - RNA, 32 nt, Human
uuagacagggucuugcuccguugcccagguug

SEQ ID NO: 532617 - RNA, 32 nt, Human
uuagacaggugaggaaacuggggcacagagag

SEQ ID NO: 532618 - RNA, 20 nt, Human
uuagacauuguauaaaauau

SEQ ID NO: 532619 - RNA, 22 nt, Human
uuagacauuuaucaacuguuga

SEQ ID NO: 532620 - RNA, 32 nt, Human
uuagaccaagggcacagauugugcuucuguac

SEQ ID NO: 532621 - RNA, 31 nt, Human
uuagaccacagagagcuggcauucacucaaa

SEQ ID NO: 532622 - RNA, 32 nt, Human
uuagaccaccuaagaugccacuuugaauucuc

SEQ ID NO: 532623 - RNA, 32 nt, Human
uuagaccacuuguaaagauuacuccaacccag

SEQ ID NO: 532624 - RNA, 32 nt, Human
uuagaccagguaguuuguugcauugcagguaa

SEQ ID NO: 532625 - RNA, 32 nt, Human
uuagaccauacagagauguagaaagaacauaa

SEQ ID NO: 532626 - RNA, 32 nt, Human
uuagacccaagcucucuuucugacuuuccuua

SEQ ID NO: 532627 - RNA, 32 nt, Human
uuagacccaaggacccgauuccugggcuagga

SEQ ID NO: 532628 - RNA, 32 nt, Human
uuagacccaguaucuacuucugugccacaaaa

SEQ ID NO: 532629 - RNA, 32 nt, Human
uuagaccuacaugcagcccaaccucuccuucu

SEQ ID NO: 532630 - RNA, 32 nt, Human
uuagaccucuagacugguucauucuacguauc

SEQ ID NO: 532631 - RNA, 32 nt, Human
uuagaccucuccccauucugcuagcaacauac

SEQ ID NO: 532632 - RNA, 32 nt, Human
uuagaccugugucuuacacauuucucagagua

SEQ ID NO: 532633 - RNA, 32 nt, Human
uuagaccuguucuggcugaagggcuaucucug

SEQ ID NO: 532634 - RNA, 32 nt, Human
uuagaccuuaaaggagcuccaccaaaggucuc

SEQ ID NO: 532635 - RNA, 32 nt, Human
uuagacgagucauggauuuguacugaguauuu

SEQ ID NO: 532636 - RNA, 21 nt, Human
uuagacgauguguaauguuaa

SEQ ID NO: 532637 - RNA, 32 nt, Human
uuagacggaaagggaaacugaggcucaggaga

SEQ ID NO: 532638 - RNA, 32 nt, Human
uuagacggaggcaggaguuucguuagaaagcg

SEQ ID NO: 532639 - RNA, 32 nt, Human
uuagacggaguuuugcucuuuguugcccaggc

SEQ ID NO: 532640 - RNA, 32 nt, Human
uuagacggucucaaucuaaaagcacuucaagg

SEQ ID NO: 532641 - RNA, 32 nt, Human
uuagacuacaaucugugcagacagcauggaca

SEQ ID NO: 532642 - RNA, 32 nt, Human
uuagacucaaaacccgcaggagaaacaggucc

SEQ ID NO: 532643 - RNA, 32 nt, Human
uuagacuccaaaaggauuauaaaacucccaaa

SEQ ID NO: 532644 - RNA, 32 nt, Human
uuagacuccaucccucaacuucucccauccuc

SEQ ID NO: 532645 - RNA, 32 nt, Human
uuagacucccacagaggggacugucuguauca

SEQ ID NO: 532646 - RNA, 32 nt, Human
uuagacuccucaccauccuuaaguucagugac

SEQ ID NO: 532647 - RNA, 32 nt, Human
uuagacucuaucaugggcccccaugaagcucc

SEQ ID NO: 532648 - RNA, 32 nt, Human
uuagacucuccacagcauucaugucaauaugg

SEQ ID NO: 532649 - RNA, 32 nt, Human
uuagacucuuagaaauaaaaguagaagaaaga

SEQ ID NO: 532650 - RNA, 32 nt, Human
uuagacuuaagacuguaaggcagcaguguuag

SEQ ID NO: 532651 - RNA, 32 nt, Human
uuagacuuaccucccccaugcagcagacuggg

SEQ ID NO: 532652 - RNA, 32 nt, Human
uuagacuuauaggugaugcaagcaucuaagag

SEQ ID NO: 532653 - RNA, 32 nt, Human
uuagacuuaugauagaaguucauuucagccuc

SEQ ID NO: 532654 - RNA, 32 nt, Human
uuagacuucuagguaaugcaagcaucuaagag

SEQ ID NO: 532655 - RNA, 32 nt, Human
uuagacuucugguccccagaacggagagagaa

SEQ ID NO: 532656 - RNA, 32 nt, Human
uuagacuugaugcuauguugauuaauauuuaa

SEQ ID NO: 532657 - RNA, 32 nt, Human
uuagacuuuuaacacgauggccauaaccugac

SEQ ID NO: 532658 - RNA, 32 nt, Human
uuagagaaacaacaugguuccaagaaggaggg

SEQ ID NO: 532659 - RNA, 32 nt, Human
uuagagaaaucucggcggucaggaggcccggg

SEQ ID NO: 532660 - RNA, 32 nt, Human
uuagagaacagccugguuaacauggugaaaca

SEQ ID NO: 532661 - RNA, 32 nt, Human
uuagagaagaaagaacaggcuuugaagaagag

SEQ ID NO: 532662 - RNA, 32 nt, Human
uuagagaagugacauggccuugaggagauuca

SEQ ID NO: 532663 - RNA, 32 nt, Human
uuagagaaguugcagaagcagugaagccacua

SEQ ID NO: 532664 - RNA, 22 nt, Human
uuagagaauaugcaaauauuga

SEQ ID NO: 532665 - RNA, 32 nt, Human
uuagagaaucaagcugacacaggccagagaau

SEQ ID NO: 532666 - RNA, 31 nt, Human
uuagagacagagagagaaaaaggcugaaaug

SEQ ID NO: 532667 - RNA, 32 nt, Human
uuagagacagcaucggugucugcugcuguguc

SEQ ID NO: 532668 - RNA, 32 nt, Human
uuagagacaggcacaugggcagcucuguuccc

SEQ ID NO: 532669 - RNA, 24 nt, Human
uuagagaccacccugggcaaugua

SEQ ID NO: 532670 - RNA, 32 nt, Human
uuagagaccagcccagccuggucaacauggca

SEQ ID NO: 532671 - RNA, 32 nt, Human
uuagagaccagccuggccaacaaggcaaaacc

SEQ ID NO: 532672 - RNA, 24 nt, Human
uuagagaccagccugggaaacaua

SEQ ID NO: 532673 - RNA, 32 nt, Human
uuagagaccagccugggaaacauagcgaaacc

SEQ ID NO: 532674 - RNA, 24 nt, Human
uuagagaccagccugggcaacaug

SEQ ID NO: 532675 - RNA, 32 nt, Human
uuagagaccagccugggcaacaugaugugaaa

SEQ ID NO: 532676 - RNA, 32 nt, Human
uuagagaccagccugggcaacauggugaaauc

SEQ ID NO: 532677 - RNA, 32 nt, Human
uuagagaccagccugggcaacguauugagacc

SEQ ID NO: 532678 - RNA, 32 nt, Human
uuagagaccagccugggccaacguggugaaac

SEQ ID NO: 532679 - RNA, 32 nt, Human
uuagagaccagccuguccaacguggugaaacc

SEQ ID NO: 532680 - RNA, 32 nt, Human
uuagagaccccgagguagggguggggagaugc

SEQ ID NO: 532681 - RNA, 32 nt, Human
uuagagacugcuccuauaauugaggaaucagc

SEQ ID NO: 532682 - RNA, 32 nt, Human
uuagagagagaacacuuagucuugccugucaa

SEQ ID NO: 532683 - RNA, 32 nt, Human
uuagagagcagccugggcaacauagcaagaac

SEQ ID NO: 532684 - RNA, 32 nt, Human
uuagagagcuugucuuucaaggccagguuccc

SEQ ID NO: 532685 - RNA, 32 nt, Human
uuagagaggaggaggaaagggggagaggaaau

SEQ ID NO: 532686 - RNA, 32 nt, Human
uuagagaggucccccaaagaaaccacugguuu

SEQ ID NO: 532687 - RNA, 32 nt, Human
uuagagaguucugcacaguacuguccuccaga

SEQ ID NO: 532688 - RNA, 32 nt, Human
uuagagauaccuccccuccuucugcucagcug

SEQ ID NO: 532689 - RNA, 32 nt, Human
uuagagaucaaagaagucagagagauuggaag

SEQ ID NO: 532690 - RNA, 32 nt, Human
uuagagaucccagucugguauccucuggagag

SEQ ID NO: 532691 - RNA, 32 nt, Human
uuagagaucuuagauccuaguuuuugauguug

SEQ ID NO: 532692 - RNA, 21 nt, Human
uuagagaugaaaguagcccac

SEQ ID NO: 532693 - RNA, 32 nt, Human
uuagagauuauguacacaagggcaugggcuca

SEQ ID NO: 532694 - RNA, 32 nt, Human
uuagagcaacuuguacauuugaccucuuguua

SEQ ID NO: 532695 - RNA, 32 nt, Human
uuagagcaaucaucucugccacugacccagug

SEQ ID NO: 532696 - RNA, 32 nt, Human
uuagagcagcacaaccggacuaacacagugac

SEQ ID NO: 532697 - RNA, 32 nt, Human
uuagagccucagcugcuaauauuguugagugc

SEQ ID NO: 532698 - RNA, 32 nt, Human
uuagagcuaggaguuugagaccagccugggca

SEQ ID NO: 532699 - RNA, 32 nt, Human
uuagagcuuaagacacaccugccuucauuuca

SEQ ID NO: 532700 - RNA, 32 nt, Human
uuagagcuucagucuuuggagcacacagggcc

SEQ ID NO: 532701 - RNA, 32 nt, Human
uuagagcuuccagagagcauagcugcuuccau

SEQ ID NO: 532702 - RNA, 32 nt, Human
uuagagcuucggcuugaccucugugauaaaua

SEQ ID NO: 532703 - RNA, 23 nt, Human
uuagagcuuucauuugaucugua

SEQ ID NO: 532704 - RNA, 32 nt, Human
uuagaggaggaggaggaggaggaagaggugga

SEQ ID NO: 532705 - RNA, 31 nt, Human
uuagaggagucaggagaaaaagucauuguua

SEQ ID NO: 532706 - RNA, 32 nt, Human
uuagaggcaauauuuucuacuugcaaucaauu

SEQ ID NO: 532707 - RNA, 32 nt, Human
uuagaggcacuugagcaaggcccccacauccc

SEQ ID NO: 532708 - RNA, 32 nt, Human
uuagaggccaggaccacaguuaggauuggguu

SEQ ID NO: 532709 - RNA, 32 nt, Human
uuagaggcuggaccagcauuguugggcaagga

SEQ ID NO: 532710 - RNA, 32 nt, Human
uuagagggagcugggaaggaaggaagggggcg

SEQ ID NO: 532711 - RNA, 32 nt, Human
uuagaggggaaugaaccauggcaccuuugaga

SEQ ID NO: 532712 - RNA, 32 nt, Human
uuagaggggccaggcagcggggcagggacagg

SEQ ID NO: 532713 - RNA, 32 nt, Human
uuagagggggucucacuuuguugcccaggcug

SEQ ID NO: 532714 - RNA, 32 nt, Human
uuagagguaugggccagagaggacugggucag

SEQ ID NO: 532715 - RNA, 32 nt, Human
uuagaggugagcuggggccggagaagccacgg

SEQ ID NO: 532716 - RNA, 32 nt, Human
uuagagguugcagugagguaugaucaugccau

SEQ ID NO: 532717 - RNA, 32 nt, Human
uuagaguacaaaacauguucucccugcagucu

SEQ ID NO: 532718 - RNA, 32 nt, Human
uuagaguagagaagaaaaguaggggugcaaua

SEQ ID NO: 532719 - RNA, 32 nt, Human
uuagagucaaaggcagaggggcuuccaggccc

SEQ ID NO: 532720 - RNA, 32 nt, Human
uuagagucaaggccuggauuucaugccacuaa

SEQ ID NO: 532721 - RNA, 32 nt, Human
uuagaguccagccuggccaacauggugaaacc

SEQ ID NO: 532722 - RNA, 32 nt, Human
uuagaguccaguucuagagacuccucagccuc

SEQ ID NO: 532723 - RNA, 32 nt, Human
uuagaguccccagaaaggaaugcagccuugcu

SEQ ID NO: 532724 - RNA, 32 nt, Human
uuagaguccgaccucuggaaauguccacaccu

SEQ ID NO: 532725 - RNA, 32 nt, Human
uuagaguccgaccucuggaaauucggguggcc

SEQ ID NO: 532726 - RNA, 32 nt, Human
uuagaguccucccaggaucccuccaaccuacc

SEQ ID NO: 532727 - RNA, 32 nt, Human
uuagagucucauaaggagcacgcaaccuagau

SEQ ID NO: 532728 - RNA, 32 nt, Human
uuagagugcauccuuuguuuaaagugaaaugg

SEQ ID NO: 532729 - RNA, 32 nt, Human
uuagaguggaaggacugauugagaauguucca

SEQ ID NO: 532730 - RNA, 32 nt, Human
uuagaguggaguuugugaguaaaagaggagcc

SEQ ID NO: 532731 - RNA, 32 nt, Human
uuagaguggcuuagugugacacacaggcaucu

SEQ ID NO: 532732 - RNA, 32 nt, Human
uuagaguggggagugggcuucuuccuccaaga

SEQ ID NO: 532733 - RNA, 32 nt, Human
uuagagugguggcacugagaaaagaauguaag

SEQ ID NO: 532734 - RNA, 32 nt, Human
uuagaguguaguucaacucauuugucacaugg

SEQ ID NO: 532735 - RNA, 32 nt, Human
uuagaguguauaaaauucugucuuucauuucc

SEQ ID NO: 532736 - RNA, 32 nt, Human
uuagaguuaagaauucucuagcaaacaacaga

SEQ ID NO: 532737 - RNA, 32 nt, Human
uuagaguuccaugaacaccauaccuuugcuac

SEQ ID NO: 532738 - RNA, 32 nt, Human
uuagaguugcuaaugacuguccuugaaauuau

SEQ ID NO: 532739 - RNA, 32 nt, Human
uuagaguuuaaucucaugcucuaccuuuauuu

SEQ ID NO: 532740 - RNA, 32 nt, Human
uuagauaacuuagauauaguuucuugauagga

SEQ ID NO: 532741 - RNA, 32 nt, Human
uuagauaccauccugagggucugaaauuaaac

SEQ ID NO: 532742 - RNA, 32 nt, Human
uuagauaccuugaaaggcaggaagggaagcgu

SEQ ID NO: 532743 - RNA, 32 nt, Human
uuagauacucugugaggugcaagacuucaggg

SEQ ID NO: 532744 - RNA, 26 nt, Human
uuagauacuugcaauuuaaauguuaa

SEQ ID NO: 532745 - RNA, 32 nt, Human
uuagauaucaugcaaauuucaugaccaguaaa

SEQ ID NO: 532746 - RNA, 32 nt, Human
uuagauauugaaucucguuacaggguuauuua

SEQ ID NO: 532747 - RNA, 23 nt, Human
uuagauauuguaucaaucuuuag

SEQ ID NO: 532748 - RNA, 32 nt, Human
uuagaucaucuaaaucagguaugagugaaacu

SEQ ID NO: 532749 - RNA, 32 nt, Human
uuagaucaugccaccaugccacugcacuccag

SEQ ID NO: 532750 - RNA, 32 nt, Human
uuagaucaugccacugcacuccagccuaugug

SEQ ID NO: 532751 - RNA, 32 nt, Human
uuagaucauuagcucagugaccuccuaggguu

SEQ ID NO: 532752 - RNA, 32 nt, Human
uuagauccucaccauuucugcucucaaauuga

SEQ ID NO: 532753 - RNA, 32 nt, Human
uuagaucgaacuguaacauuauuccaaucaca

SEQ ID NO: 532754 - RNA, 32 nt, Human
uuagaucuccaggaguuggggcuccagaaccu

SEQ ID NO: 532755 - RNA, 32 nt, Human
uuagaugaaaucugguaggagaacauagauca

SEQ ID NO: 532756 - RNA, 32 nt, Human
uuagaugagaauucacuuguucugucaguaau

SEQ ID NO: 532757 - RNA, 32 nt, Human
uuagaugagcuucuuuccuccauuucaccugg

SEQ ID NO: 532758 - RNA, 32 nt, Human
uuagaugaggcuauugccuugaugacagcugu

SEQ ID NO: 532759 - RNA, 32 nt, Human
uuagaugagguguugcuguguugcccaagcug

SEQ ID NO: 532760 - RNA, 32 nt, Human
uuagaugauucacuuagaaaacaaauaaacuu

SEQ ID NO: 532761 - RNA, 32 nt, Human
uuagaugauucacuuuuugccccuagggauga

SEQ ID NO: 532762 - RNA, 32 nt, Human
uuagaugcucauaaggagugcacaaccgccgg

SEQ ID NO: 532763 - RNA, 32 nt, Human
uuagauggagucucgcucugucacccagacug

SEQ ID NO: 532764 - RNA, 32 nt, Human
uuagauggagucuugcuccgucgcccaggcug

SEQ ID NO: 532765 - RNA, 32 nt, Human
uuagauggagucuugcucugucgcccacccag

SEQ ID NO: 532766 - RNA, 32 nt, Human
uuagaugggagaaaccucuagagagaguaaaa

SEQ ID NO: 532767 - RNA, 32 nt, Human
uuagauguccucuuggagaaaauaacaagagu

SEQ ID NO: 532768 - RNA, 32 nt, Human
uuagaugugcaaccuguggcucaggggagcaa

SEQ ID NO: 532769 - RNA, 32 nt, Human
uuagauguggguggguguggccgccucugccc

SEQ ID NO: 532770 - RNA, 32 nt, Human
uuagauguguguuucaggcuuggaguguauga

SEQ ID NO: 532771 - RNA, 32 nt, Human
uuagauguuuacugcugaaguaggucagaaau

SEQ ID NO: 532772 - RNA, 32 nt, Human
uuagauuaaccucaccaaaugaagcuuuuucu

SEQ ID NO: 532773 - RNA, 32 nt, Human
uuagauuaauucaacuccugagguccugaagg

SEQ ID NO: 532774 - RNA, 32 nt, Human
uuagauuauuaucacaccacuguggacuguuc

SEQ ID NO: 532775 - RNA, 32 nt, Human
uuagauuccagagacaucagcauggcucaaag

SEQ ID NO: 532776 - RNA, 32 nt, Human
uuagauuccuccauccaugacccccugccccu

SEQ ID NO: 532777 - RNA, 32 nt, Human
uuagauuccuuucccuucucuccaguucuccu

SEQ ID NO: 532778 - RNA, 32 nt, Human
uuagauucucauaaggagcaaacaaccaagau

SEQ ID NO: 532779 - RNA, 32 nt, Human
uuagauucucauaaggagugcacaaucuagau

SEQ ID NO: 532780 - RNA, 32 nt, Human
uuagauucucauaaggagugugcaaucuagau

SEQ ID NO: 532781 - RNA, 32 nt, Human
uuagauucucauaaggaguucacagccuagau

SEQ ID NO: 532782 - RNA, 32 nt, Human
uuagauucuuuugcuaggugggagauuguuau

SEQ ID NO: 532783 - RNA, 32 nt, Human
uuagauugcucuucuagaaccauggcuagaag

SEQ ID NO: 532784 - RNA, 32 nt, Human
uuagauugggagcuccuugagggcagaguacg

SEQ ID NO: 532785 - RNA, 32 nt, Human
uuagauuucacucagcauuuaguagguccagu

SEQ ID NO: 532786 - RNA, 32 nt, Human
uuagauuuguggagucuuugugcugcuucugg

SEQ ID NO: 532787 - RNA, 32 nt, Human
uuagauuuuaucacucucugcuaagacaauau

SEQ ID NO: 532788 - RNA, 32 nt, Human
uuagauuuucaaggaugcucuucauccagcug

SEQ ID NO: 532789 - RNA, 32 nt, Human
uuagauuuuugaaagaaaacccuuugguuuca

SEQ ID NO: 532790 - RNA, 32 nt, Human
uuagcaaacugaugcugaggaugauugaggug

SEQ ID NO: 532791 - RNA, 32 nt, Human
uuagcaaagcagguggcccacagugaccucca

SEQ ID NO: 532792 - RNA, 32 nt, Human
uuagcaaaggggcaauggggugccuacuaugu

SEQ ID NO: 532793 - RNA, 23 nt, Human
uuagcaaaugauugauucucccu

SEQ ID NO: 532794 - RNA, 32 nt, Human
uuagcaaaugugccauuuucacacaacuucuc

SEQ ID NO: 532795 - RNA, 19 nt, Human
uuagcaaauugauuuaccu

SEQ ID NO: 532796 - RNA, 32 nt, Human
uuagcaaccacagagucagugaccucgucugu

SEQ ID NO: 532797 - RNA, 32 nt, Human
uuagcaaccuucauuccaucugccuccuucau

SEQ ID NO: 532798 - RNA, 32 nt, Human
uuagcaacuguuacuucaaccaucuagguuga

SEQ ID NO: 532799 - RNA, 32 nt, Human
uuagcaagaaagucuuaauuugugucacgauu

SEQ ID NO: 532800 - RNA, 32 nt, Human
uuagcaagaccacgaacccacagggaggaaca

SEQ ID NO: 532801 - RNA, 32 nt, Human
uuagcaagcagguuucacugcuucauuagaag

SEQ ID NO: 532802 - RNA, 32 nt, Human
uuagcaagcgugugugacagagaguggggaaa

SEQ ID NO: 532803 - RNA, 32 nt, Human
uuagcaagcuccuggagucugaugcuuuugca

SEQ ID NO: 532804 - RNA, 32 nt, Human
uuagcaaggaaaguacaaaauaguuuauguag

SEQ ID NO: 532805 - RNA, 32 nt, Human
uuagcaaggcauucagagccuuucaaauccca

SEQ ID NO: 532806 - RNA, 21 nt, Human
uuagcaagucugguguuuuaa

SEQ ID NO: 532807 - RNA, 32 nt, Human
uuagcaauagcuccacuuugggugggggagau

SEQ ID NO: 532808 - RNA, 32 nt, Human
uuagcaaugaggaggaaaugugaucuggcugu

SEQ ID NO: 532809 - RNA, 32 nt, Human
uuagcaauuggcuguugaugugccucagcugu

SEQ ID NO: 532810 - RNA, 32 nt, Human
uuagcaauuuccauauacuauauuguggaaaa

SEQ ID NO: 532811 - RNA, 32 nt, Human
uuagcacaaguuagggaggaagaggcaggcga

SEQ ID NO: 532812 - RNA, 32 nt, Human
uuagcacaggauccuucccuggaacaucagca

SEQ ID NO: 532813 - RNA, 32 nt, Human
uuagcacaucacugcacacacaguauucugaa

SEQ ID NO: 532814 - RNA, 32 nt, Human
uuagcaccauacuugcuauuugcaauuaaugu

SEQ ID NO: 532815 - RNA, 32 nt, Human
uuagcaccuggaccagcagcugcugugcucga

SEQ ID NO: 532816 - RNA, 32 nt, Human
uuagcacguuuaccauacguuuaaaauccauu

SEQ ID NO: 532817 - RNA, 32 nt, Human
uuagcacucuagcugcccacuccagggcaggg

SEQ ID NO: 532818 - RNA, 32 nt, Human
uuagcacuggaagcuuuugcucgcaguuugcu

SEQ ID NO: 532819 - RNA, 32 nt, Human
uuagcacuuaagaucagauucaagagaauaua

SEQ ID NO: 532820 - RNA, 32 nt, Human
uuagcagaacagaacccagggccagacugugu

SEQ ID NO: 532821 - RNA, 32 nt, Human
uuagcagaaggugagcaagaaguuggagacug

SEQ ID NO: 532822 - RNA, 32 nt, Human
uuagcagacaacaggugaaaccaacaggguuu

SEQ ID NO: 532823 - RNA, 32 nt, Human
uuagcagacagcauuuucagacagcauuuuca

SEQ ID NO: 532824 - RNA, 32 nt, Human
uuagcagacugguguguguggaucugcagugc

SEQ ID NO: 532825 - RNA, 32 nt, Human
uuagcagagacaccucguuaagcuccgggaug

SEQ ID NO: 532826 - RNA, 32 nt, Human
uuagcagagacaggguuucaccauguuggcca

SEQ ID NO: 532827 - RNA, 32 nt, Human
uuagcagagacaggguuucaccguguuggcca

SEQ ID NO: 532828 - RNA, 32 nt, Human
uuagcagcagagggcaguuccccagcuugaug

SEQ ID NO: 532829 - RNA, 32 nt, Human
uuagcagcagcguucccugccuccugcaggau

SEQ ID NO: 532830 - RNA, 32 nt, Human
uuagcagcccuggaugguggccagaaauaaag

SEQ ID NO: 532831 - RNA, 18 nt, Human
uuagcagccucagcacug

SEQ ID NO: 532832 - RNA, 32 nt, Human
uuagcagcgaugacacagcaaggaugacucag

SEQ ID NO: 532833 - RNA, 23 nt, Human
uuagcagcuaguaacuucacuua

SEQ ID NO: 532834 - RNA, 32 nt, Human
uuagcagcuaucucucagugaacugugagggu

SEQ ID NO: 532835 - RNA, 32 nt, Human
uuagcagcucugacuaacaggcugcaaagugc

SEQ ID NO: 532836 - RNA, 32 nt, Human
uuagcaggaagcuuccugaagggccgagcggg

SEQ ID NO: 532837 - RNA, 32 nt, Human
uuagcaggagagaaagcaaggaguugucagga

SEQ ID NO: 532838 - RNA, 32 nt, Human
uuagcaggagcagauuuuucccagaagcugcu

SEQ ID NO: 532839 - RNA, 32 nt, Human
uuagcagggaggaggaagaggagaggaggaag

SEQ ID NO: 532840 - RNA, 32 nt, Human
uuagcagguuggugagagaagcuccccugagc

SEQ ID NO: 532841 - RNA, 32 nt, Human
uuagcaguccuggaaguugaagguggagaugg

SEQ ID NO: 532842 - RNA, 32 nt, Human
uuagcaguggugaggccggaguacuccacacg

SEQ ID NO: 532843 - RNA, 32 nt, Human
uuagcaguuuuuaaaaacuaguuguuaaauuu

SEQ ID NO: 532844 - RNA, 32 nt, Human
uuagcauaaagugcuugcaauuucucuccaca

SEQ ID NO: 532845 - RNA, 32 nt, Human
uuagcauaacccuuccucaggaagagugagau

SEQ ID NO: 532846 - RNA, 32 nt, Human
uuagcauaauggcagaaccuguuucuccacug

SEQ ID NO: 532847 - RNA, 32 nt, Human
uuagcauaauugcagugcuaaugaauaucgga

SEQ ID NO: 532848 - RNA, 32 nt, Human
uuagcauagggcucagggcacacguugccacc

SEQ ID NO: 532849 - RNA, 32 nt, Human
uuagcauaguaagcagauauuucuacuuuugu

SEQ ID NO: 532850 - RNA, 32 nt, Human
uuagcauagugccuggugagugaugucccaau

SEQ ID NO: 532851 - RNA, 32 nt, Human
uuagcaucauuugaggccuggaaggcuaugaa

SEQ ID NO: 532852 - RNA, 32 nt, Human
uuagcaucuucuuuaccuccaguguuccugcc

SEQ ID NO: 532853 - RNA, 32 nt, Human
uuagcauggauugagccagaucuguuccuuac

SEQ ID NO: 532854 - RNA, 32 nt, Human
uuagcaugggacauagucaguguuugaagugc

SEQ ID NO: 532855 - RNA, 32 nt, Human
uuagcauucaacuuaagucaagaaauacuuau

SEQ ID NO: 532856 - RNA, 32 nt, Human
uuagcauuugagagaagaggccaggggccuug

SEQ ID NO: 532857 - RNA, 25 nt, Human
uuagcauuugcauguguaauauuaa

SEQ ID NO: 532858 - RNA, 32 nt, Human
uuagccaacucucaaaccuuacuaaacacaag

SEQ ID NO: 532859 - RNA, 32 nt, Human
uuagccaagcuccucaaccuucucccaggccc

SEQ ID NO: 532860 - RNA, 32 nt, Human
uuagccaauauggugaaaccccgucucuacua

SEQ ID NO: 532861 - RNA, 32 nt, Human
uuagccaaugacaacucacucuccccuacucc

SEQ ID NO: 532862 - RNA, 32 nt, Human
uuagccacacuucucccuucaggggcuucgga

SEQ ID NO: 532863 - RNA, 32 nt, Human
uuagccacagcuguuuuaagacuucugaucuc

SEQ ID NO: 532864 - RNA, 32 nt, Human
uuagccacaggcagaauagcuuucgaugaccc

SEQ ID NO: 532865 - RNA, 32 nt, Human
uuagccacugaacuucaguggaggguggugag

SEQ ID NO: 532866 - RNA, 32 nt, Human
uuagccagacuuguuuugcuaucuuauaagca

SEQ ID NO: 532867 - RNA, 32 nt, Human
uuagccagcugccucugcuguaguacauggcc

SEQ ID NO: 532868 - RNA, 32 nt, Human
uuagccaggugugguggcaagugccuuuaauc

SEQ ID NO: 532869 - RNA, 32 nt, Human
uuagccagugacugcagagcagggauaccaag

SEQ ID NO: 532870 - RNA, 32 nt, Human
uuagccagugauuaaggaauccauuauguaac

SEQ ID NO: 532871 - RNA, 32 nt, Human
uuagccaguucuauaauaucuuccugugauuu

SEQ ID NO: 532872 - RNA, 32 nt, Human
uuagccaguugcucugccacagacauagacaa

SEQ ID NO: 532873 - RNA, 32 nt, Human
uuagccauaagacauguuucaagugaaucgaa

SEQ ID NO: 532874 - RNA, 32 nt, Human
uuagcccaagugguacagugaauuugcuuuaa

SEQ ID NO: 532875 - RNA, 32 nt, Human
uuagcccaggaguucaagaucagcuugugcaa

SEQ ID NO: 532876 - RNA, 32 nt, Human
uuagcccaugaggaggaugugaccgggacuga

SEQ ID NO: 532877 - RNA, 32 nt, Human
uuagccccaaagcucuucuaguucucaccugg

SEQ ID NO: 532878 - RNA, 21 nt, Human
uuagccccaacucugugcuca

SEQ ID NO: 532879 - RNA, 32 nt, Human
uuagccccaagaagguucuggaaagcuccagg

SEQ ID NO: 532880 - RNA, 32 nt, Human
uuagccccaguuccugcacgcuccagggaacg

SEQ ID NO: 532881 - RNA, 32 nt, Human
uuagcccccacccugccuggugugcagcuaac

SEQ ID NO: 532882 - RNA, 22 nt, Human
uuagccccuccaucuagucuca

SEQ ID NO: 532883 - RNA, 26 nt, Human
uuagccccuuccuuucucugggcuca

SEQ ID NO: 532884 - RNA, 32 nt, Human
uuagcccgggacccgaacccagccucuccccu

SEQ ID NO: 532885 - RNA, 32 nt, Human
uuagcccguccgggggcaccgucacggucagg

SEQ ID NO: 532886 - RNA, 32 nt, Human
uuagcccuccagcauuuaaaacaugauaaauu

SEQ ID NO: 532887 - RNA, 32 nt, Human
uuagcccucuacuguugaccaaucaccaaaug

SEQ ID NO: 532888 - RNA, 32 nt, Human
uuagcccucugaguacuuugaagcacuuuugc

SEQ ID NO: 532889 - RNA, 20 nt, Human
uuagcccugagccugcacuu

SEQ ID NO: 532890 - RNA, 32 nt, Human
uuagcccugagccugcacuuccuguucaggug

SEQ ID NO: 532891 - RNA, 32 nt, Human
uuagcccugcuaaacuauguacagaggaaacu

SEQ ID NO: 532892 - RNA, 32 nt, Human
uuagcccugggccaccuccuccaguucuuccu

SEQ ID NO: 532893 - RNA, 32 nt, Human
uuagcccuguugcccauguaugcagaugggag

SEQ ID NO: 532894 - RNA, 32 nt, Human
uuagcccuuaacccuaaggcucagggaaauac

SEQ ID NO: 532895 - RNA, 32 nt, Human
uuagcccuuguaauccuagcacuuugggaggc

SEQ ID NO: 532896 - RNA, 32 nt, Human
uuagcccuuucccagagacugauaaacagggg

SEQ ID NO: 532897 - RNA, 32 nt, Human
uuagccgagauggcuggaucaucugaggucag

SEQ ID NO: 532898 - RNA, 32 nt, Human
uuagccgggugugggcugggcgcgguggcuca

SEQ ID NO: 532899 - RNA, 32 nt, Human
uuagccgugguggcaggugccuguaaucccag

SEQ ID NO: 532900 - RNA, 32 nt, Human
uuagccuaguacugcuguacuggccuguaugu

SEQ ID NO: 532901 - RNA, 32 nt, Human
uuagccucaaaagcauguaguaccaagcacuu

SEQ ID NO: 532902 - RNA, 32 nt, Human
uuagccucccaaaaugcugggauuacagguau

SEQ ID NO: 532903 - RNA, 32 nt, Human
uuagccucccaaaguacugggauuacagguga

SEQ ID NO: 532904 - RNA, 32 nt, Human
uuagccucccaaagugcugggaugacaggcgu

SEQ ID NO: 532905 - RNA, 32 nt, Human
uuagccucccaaagugcugggauuacaagcau

SEQ ID NO: 532906 - RNA, 32 nt, Human
uuagccucccaaagugcugggauuacagcugu

SEQ ID NO: 532907 - RNA, 32 nt, Human
uuagccucccaaagugcugggauuacaggaug

SEQ ID NO: 532908 - RNA, 32 nt, Human
uuagccucccaaagugcugggauuacaggcau

SEQ ID NO: 532909 - RNA, 32 nt, Human
uuagccucccaaagugcugggauuacaggcgc

SEQ ID NO: 532910 - RNA, 32 nt, Human
uuagccucccaaagugcugggauuacaggcgu

SEQ ID NO: 532911 - RNA, 32 nt, Human
uuagccucccaaagugcugggauuagguguga

SEQ ID NO: 532912 - RNA, 32 nt, Human
uuagccucccaaaguguugggauuauaagcgu

SEQ ID NO: 532913 - RNA, 32 nt, Human
uuagccucccaaguagcugggauuacaggcag

SEQ ID NO: 532914 - RNA, 32 nt, Human
uuagccucccaaguagcugggauuacaggcau

SEQ ID NO: 532915 - RNA, 32 nt, Human
uuagccucccaaguagcugggauuacaggcgu

SEQ ID NO: 532916 - RNA, 32 nt, Human
uuagccucccaaguagcugggauuacaggugu

SEQ ID NO: 532917 - RNA, 32 nt, Human
uuagccucccaagucacugggauuacaggugc

SEQ ID NO: 532918 - RNA, 32 nt, Human
uuagccucccagaguacugggauuacaggcuc

SEQ ID NO: 532919 - RNA, 32 nt, Human
uuagccucccgaguaacugggauuauaggcau

SEQ ID NO: 532920 - RNA, 32 nt, Human
uuagccucccgaguagcugggauuacagccug

SEQ ID NO: 532921 - RNA, 32 nt, Human
uuagccucccgaguagcugggauuacaggcgc

SEQ ID NO: 532922 - RNA, 32 nt, Human
uuagccuccuaaagugcugggauuauaggcau

SEQ ID NO: 532923 - RNA, 32 nt, Human
uuagccuccuaaguagcugggauuacaagugc

SEQ ID NO: 532924 - RNA, 32 nt, Human
uuagccuccugaguagcugggauucucuacuu

SEQ ID NO: 532925 - RNA, 32 nt, Human
uuagccucucaaaaugcugggauuacaggugu

SEQ ID NO: 532926 - RNA, 32 nt, Human
uuagccucucaaguagcugggauuacaggcgc

SEQ ID NO: 532927 - RNA, 32 nt, Human
uuagccucuccccucuuggccuccuuucccac

SEQ ID NO: 532928 - RNA, 32 nt, Human
uuagccucugcuucaagcuuagcaauauauuc

SEQ ID NO: 532929 - RNA, 32 nt, Human
uuagccucuucucuaaaugcuuccucaagcuu

SEQ ID NO: 532930 - RNA, 32 nt, Human
uuagccuggaggucaaggcugcagugagccau

SEQ ID NO: 532931 - RNA, 32 nt, Human
uuagccuggccugagacaggacaggaaggggc

SEQ ID NO: 532932 - RNA, 32 nt, Human
uuagccugggcaccuggcucaaucuuguaacu

SEQ ID NO: 532933 - RNA, 32 nt, Human
uuagccugggcgacaagagcaagacuccaucu

SEQ ID NO: 532934 - RNA, 23 nt, Human
uuagccugggcgacagagcgaga

SEQ ID NO: 532935 - RNA, 19 nt, Human
uuagccugggcgaccgaga

SEQ ID NO: 532936 - RNA, 23 nt, Human
uuagccugggugacagagcgaga

SEQ ID NO: 532937 - RNA, 23 nt, Human
uuagccugggugacagagugaga

SEQ ID NO: 532938 - RNA, 32 nt, Human
uuagccugguaaggccgggugcaguggcucac

SEQ ID NO: 532939 - RNA, 32 nt, Human
uuagccugguggcaguggugagggagugagga

SEQ ID NO: 532940 - RNA, 32 nt, Human
uuagccuguccugucaucaucauggccagcug

SEQ ID NO: 532941 - RNA, 32 nt, Human
uuagccuguggucuccugugugcugcugcccg

SEQ ID NO: 532942 - RNA, 32 nt, Human
uuagccuuaucugucauuaucucccuuucucc

SEQ ID NO: 532943 - RNA, 32 nt, Human
uuagccuuauggacugccccuggaccaucacc

SEQ ID NO: 532944 - RNA, 32 nt, Human
uuagccuucauaugcccuucccugcaugcuuc

SEQ ID NO: 532945 - RNA, 32 nt, Human
uuagccuucccagggaaggaaccaugccccac

SEQ ID NO: 532946 - RNA, 32 nt, Human
uuagccuucccuaaccuccucaguguuuucua

SEQ ID NO: 532947 - RNA, 32 nt, Human
uuagccuugacaaaaugucucaguuaaguaua

SEQ ID NO: 532948 - RNA, 26 nt, Human
uuagccuuugucugagaauggguuua

SEQ ID NO: 532949 - RNA, 32 nt, Human
uuagccuuuuuaaaaaugugacuuuaacccgc

SEQ ID NO: 532950 - RNA, 32 nt, Human
uuagcgaagcacccaccucccuuuucucagcc

SEQ ID NO: 532951 - RNA, 32 nt, Human
uuagcgauuaaaaucucuagguggugagagua

SEQ ID NO: 532952 - RNA, 32 nt, Human
uuagcgccuggccggcuggaggcugcacagac

SEQ ID NO: 532953 - RNA, 32 nt, Human
uuagcggccggguggagguggggagggaagac

SEQ ID NO: 532954 - RNA, 32 nt, Human
uuagcggggagaaaggagggucgcccagcuuu

SEQ ID NO: 532955 - RNA, 32 nt, Human
uuagcggggagagagauggagcaucgagugac

SEQ ID NO: 532956 - RNA, 32 nt, Human
uuagcggggagggaagccaggggauuuugaag

SEQ ID NO: 532957 - RNA, 32 nt, Human
uuagcggguucagugggcucaaucugcgcagc

SEQ ID NO: 532958 - RNA, 31 nt, Human
uuagcgugacuucaguuuugacuaaggauga

SEQ ID NO: 532959 - RNA, 32 nt, Human
uuagcguggacagauacuccaucucuauuauc

SEQ ID NO: 532960 - RNA, 32 nt, Human
uuagcuaaaauggaucaauuccuugcaagaug

SEQ ID NO: 532961 - RNA, 32 nt, Human
uuagcuaaacuuccacuucauaacuuucggcg

SEQ ID NO: 532962 - RNA, 32 nt, Human
uuagcuaacauacccucccucuccacaacccc

SEQ ID NO: 532963 - RNA, 32 nt, Human
uuagcuacucgagaggccaaagaaggaggaug

SEQ ID NO: 532964 - RNA, 32 nt, Human
uuagcuagacagaaaaguuccccaagucccca

SEQ ID NO: 532965 - RNA, 32 nt, Human
uuagcuagagucagaccagaaugaaaaugcca

SEQ ID NO: 532966 - RNA, 32 nt, Human
uuagcuaggagacuggaaaaagaccaggaggc

SEQ ID NO: 532967 - RNA, 32 nt, Human
uuagcuaggcaugguggcacaugccuguaauc

SEQ ID NO: 532968 - RNA, 32 nt, Human
uuagcuagggcuuaaauaaacauguugcuaug

SEQ ID NO: 532969 - RNA, 32 nt, Human
uuagcuaguagcaaccguguuuucuccagauc

SEQ ID NO: 532970 - RNA, 32 nt, Human
uuagcuagucuucauguacugguacaaaagaa

SEQ ID NO: 532971 - RNA, 32 nt, Human
uuagcuauuguuauuaacaagaucuccauggc

SEQ ID NO: 532972 - RNA, 32 nt, Human
uuagcuauuuauuguucgaugccugcaugcug

SEQ ID NO: 532973 - RNA, 32 nt, Human
uuagcucacaugcacugagaauucuuuacagc

SEQ ID NO: 532974 - RNA, 32 nt, Human
uuagcucaccgcaaccuccaccucccggguuc

SEQ ID NO: 532975 - RNA, 32 nt, Human
uuagcucacuacaaccuccacuuuccagguuc

SEQ ID NO: 532976 - RNA, 32 nt, Human
uuagcucacugcaacccccgccucccggguuc

SEQ ID NO: 532977 - RNA, 32 nt, Human
uuagcucacugcaaccuccaccucccagguuc

SEQ ID NO: 532978 - RNA, 32 nt, Human
uuagcucacugcaaccuccaccucccggguuc

SEQ ID NO: 532979 - RNA, 32 nt, Human
uuagcucacugcaaccuccgccuccuggguuc

SEQ ID NO: 532980 - RNA, 32 nt, Human
uuagcucacugcaagcuccgccucccagguuc

SEQ ID NO: 532981 - RNA, 32 nt, Human
uuagcucacugcagccuccaccucccaggcuc

SEQ ID NO: 532982 - RNA, 32 nt, Human
uuagcucagaggagaggagcaaacaggaaaau

SEQ ID NO: 532983 - RNA, 32 nt, Human
uuagcucagcgcuugacauuuccuaagugugc

SEQ ID NO: 532984 - RNA, 32 nt, Human
uuagcucagguccaccaugggggacggcccag

SEQ ID NO: 532985 - RNA, 32 nt, Human
uuagcucauuuaaaucaaaauguguacuuuaa

SEQ ID NO: 532986 - RNA, 32 nt, Human
uuagcuccacugcccuuugagggauggaacug

SEQ ID NO: 532987 - RNA, 32 nt, Human
uuagcuccaguggaaccauagccacauaaaac

SEQ ID NO: 532988 - RNA, 32 nt, Human
uuagcuccaucuuuuccucacucccucugauu

SEQ ID NO: 532989 - RNA, 32 nt, Human
uuagcuccccauccucccuccucacucccucc

SEQ ID NO: 532990 - RNA, 32 nt, Human
uuagcucccuggggcccccugcugcugugccc

SEQ ID NO: 532991 - RNA, 32 nt, Human
uuagcuccuccacgaucccaucaugaccuaag

SEQ ID NO: 532992 - RNA, 32 nt, Human
uuagcuccuggcagagggugaguggggaccua

SEQ ID NO: 532993 - RNA, 32 nt, Human
uuagcuccuguggccccacccugggcccuggg

SEQ ID NO: 532994 - RNA, 26 nt, Human
uuagcuccugugguccuuggggcuua

SEQ ID NO: 532995 - RNA, 32 nt, Human
uuagcucuaguucucccccagcaucacuaaca

SEQ ID NO: 532996 - RNA, 32 nt, Human
uuagcucucugcaaccucugccucccagguuc

SEQ ID NO: 532997 - RNA, 32 nt, Human
uuagcucugccaugguuccuggcauuuaauca

SEQ ID NO: 532998 - RNA, 32 nt, Human
uuagcugaccaaaggggucagcagggauggcg

SEQ ID NO: 532999 - RNA, 32 nt, Human
uuagcugacuugcuagugagcuugcuuuaaaa

SEQ ID NO: 533000 - RNA, 24 nt, Human
uuagcugcaagaaugcacuuuaga

SEQ ID NO: 533001 - RNA, 23 nt, Human
uuagcugcaaucucuacuuucga

SEQ ID NO: 533002 - RNA, 32 nt, Human
uuagcugcacuggaauuucuuaccaaccaaau

SEQ ID NO: 533003 - RNA, 32 nt, Human
uuagcugcagaacccacaugugaauccuugua

SEQ ID NO: 533004 - RNA, 21 nt, Human
uuagcugcauaucaccuuagg

SEQ ID NO: 533005 - RNA, 32 nt, Human
uuagcugccagcucuguuauuucugccccuuc

SEQ ID NO: 533006 - RNA, 32 nt, Human
uuagcugcccucugcugacuucugcccuucac

SEQ ID NO: 533007 - RNA, 32 nt, Human
uuagcugcuacaccguguucaucaggaaaggu

SEQ ID NO: 533008 - RNA, 32 nt, Human
uuagcugcuacuuugagaccucggugauguua

SEQ ID NO: 533009 - RNA, 32 nt, Human
uuagcugcucacuggccccgcuugucuggccg

SEQ ID NO: 533010 - RNA, 32 nt, Human
uuagcugcucugcucugugcugggcuuguggg

SEQ ID NO: 533011 - RNA, 21 nt, Human
uuagcugcugaugacggcagg

SEQ ID NO: 533012 - RNA, 32 nt, Human
uuagcugcugcccugcccuugugaccugguca

SEQ ID NO: 533013 - RNA, 32 nt, Human
uuagcugcuguugccucccuucucaggcuggu

SEQ ID NO: 533014 - RNA, 32 nt, Human
uuagcugcuuccuccccuccuggcacccacug

SEQ ID NO: 533015 - RNA, 32 nt, Human
uuagcugcuucuauguuucauaguugggguca

SEQ ID NO: 533016 - RNA, 32 nt, Human
uuagcuggaaaccgcccaccucccucccgggu

SEQ ID NO: 533017 - RNA, 32 nt, Human
uuagcuggcuaggguugcuggaacagagggga

SEQ ID NO: 533018 - RNA, 32 nt, Human
uuagcugggagaaagagagagcuucuguugcu

SEQ ID NO: 533019 - RNA, 32 nt, Human
uuagcugggauuacaggcaugcgccaccaggc

SEQ ID NO: 533020 - RNA, 32 nt, Human
uuagcugggauuacaggcaugcgccaccauga

SEQ ID NO: 533021 - RNA, 32 nt, Human
uuagcugggauuacaggcaugugccacuaccc

SEQ ID NO: 533022 - RNA, 32 nt, Human
uuagcugggauuacaggcgugugccaccaugc

SEQ ID NO: 533023 - RNA, 32 nt, Human
uuagcugggcaugguggcaugcagugguaguc

SEQ ID NO: 533024 - RNA, 32 nt, Human
uuagcugggcaugguggcgugccugaaacccc

SEQ ID NO: 533025 - RNA, 32 nt, Human
uuagcugggcuucuccugcaauuccaccuaau

SEQ ID NO: 533026 - RNA, 32 nt, Human
uuagcuggggacauggaaguggacgaccaaac

SEQ ID NO: 533027 - RNA, 32 nt, Human
uuagcuggggucagaccugggguccucacugc

SEQ ID NO: 533028 - RNA, 32 nt, Human
uuagcugguaccucaguggggaggcuuccuua

SEQ ID NO: 533029 - RNA, 32 nt, Human
uuagcugucagugugacuuccuuucccaccca

SEQ ID NO: 533030 - RNA, 32 nt, Human
uuagcugucuuggcuacuaucugcaccuuuua

SEQ ID NO: 533031 - RNA, 32 nt, Human
uuagcuguuagacugaucuguuuguagcaguu

SEQ ID NO: 533032 - RNA, 32 nt, Human
uuagcuguugugaauagagcugcaauaaaugu

SEQ ID NO: 533033 - RNA, 32 nt, Human
uuagcuuagacuaagcuaccugccuucaaaau

SEQ ID NO: 533034 - RNA, 24 nt, Human
uuagcuuccagagggugagugagg

SEQ ID NO: 533035 - RNA, 32 nt, Human
uuagcuucccagccaaggugcugguguugcca

SEQ ID NO: 533036 - RNA, 32 nt, Human
uuagcuucccuaauuaccuuucacugacauac

SEQ ID NO: 533037 - RNA, 32 nt, Human
uuagcuuccuccugggucauuuacagacuccc

SEQ ID NO: 533038 - RNA, 32 nt, Human
uuagcuuccuuuccuucuuccaucccuucuuc

SEQ ID NO: 533039 - RNA, 32 nt, Human
uuagcuucucucuugaaucagaguaucauugu

SEQ ID NO: 533040 - RNA, 32 nt, Human
uuagcuucucuugccaccucaggggcuuggau

SEQ ID NO: 533041 - RNA, 32 nt, Human
uuagcuugaauuacaggguaaaagccaucacu

SEQ ID NO: 533042 - RNA, 32 nt, Human
uuagcuugcaggaaacacaaaauaaguaugca

SEQ ID NO: 533043 - RNA, 32 nt, Human
uuagcuuuaacacucaguuuucuaaagggaca

SEQ ID NO: 533044 - RNA, 32 nt, Human
uuagcuuuacaaaggucccacuggucccaucu

SEQ ID NO: 533045 - RNA, 32 nt, Human
uuagcuuugagucuuuaauaaacuaccuuuca

SEQ ID NO: 533046 - RNA, 22 nt, Human
uuagcuuuugaaaguguuuuaa

SEQ ID NO: 533047 - RNA, 32 nt, Human
uuaggaaacauacccaggaaguacaguugaua

SEQ ID NO: 533048 - RNA, 32 nt, Human
uuaggaaacuaagucuguggcucuucucugcu

SEQ ID NO: 533049 - RNA, 32 nt, Human
uuaggaaagacaugucugaaaugaguauagau

SEQ ID NO: 533050 - RNA, 32 nt, Human
uuaggaaaucuaggacuuccagcuucccucau

SEQ ID NO: 533051 - RNA, 32 nt, Human
uuaggaaaugcccgugaacuugcccucugggc

SEQ ID NO: 533052 - RNA, 32 nt, Human
uuaggaaccggggcagagucagcucugugcug

SEQ ID NO: 533053 - RNA, 32 nt, Human
uuaggaagaacuggugcccccuccaguccuaa

SEQ ID NO: 533054 - RNA, 32 nt, Human
uuaggaagaaggaggaaggaagaagguaaagg

SEQ ID NO: 533055 - RNA, 32 nt, Human
uuaggaagagccuuccacccaggggcagcccc

SEQ ID NO: 533056 - RNA, 32 nt, Human
uuaggaaggaaggcaacugugaggcuucugag

SEQ ID NO: 533057 - RNA, 32 nt, Human
uuaggaaggcaccaaagaaccuccucugcacu

SEQ ID NO: 533058 - RNA, 32 nt, Human
uuaggaaggccugaaaccaccuuguuaccuuu

SEQ ID NO: 533059 - RNA, 32 nt, Human
uuaggaagguggcggccagggaugaggaggcc

SEQ ID NO: 533060 - RNA, 32 nt, Human
uuaggaaguggugucagcagagacugagcugc

SEQ ID NO: 533061 - RNA, 32 nt, Human
uuaggaaguguggagucagaaugcaaacccag

SEQ ID NO: 533062 - RNA, 32 nt, Human
uuaggaauccugcuguuaaguuucucaugguu

SEQ ID NO: 533063 - RNA, 32 nt, Human
uuaggaaugaggagugggcaucaggccuggga

SEQ ID NO: 533064 - RNA, 32 nt, Human
uuaggaaugcacccggggccuccugcagauuu

SEQ ID NO: 533065 - RNA, 32 nt, Human
uuaggacaucaucuuggccaugaucuucuggg

SEQ ID NO: 533066 - RNA, 32 nt, Human
uuaggaccaauacaaaauaacaaaaauguaau

SEQ ID NO: 533067 - RNA, 32 nt, Human
uuaggaccagggauugucuugcaccaaguaug

SEQ ID NO: 533068 - RNA, 32 nt, Human
uuaggacgggaggcuguguccgugggugugca

SEQ ID NO: 533069 - RNA, 32 nt, Human
uuaggagaagaaaaguaagugaaggaauccuc

SEQ ID NO: 533070 - RNA, 32 nt, Human
uuaggagaagcccuuuaaaaagcugccuuccu

SEQ ID NO: 533071 - RNA, 32 nt, Human
uuaggagaagcgagagaaauggcaguggccac

SEQ ID NO: 533072 - RNA, 32 nt, Human
uuaggagacaaugaggaaggaggauggauucu

SEQ ID NO: 533073 - RNA, 32 nt, Human
uuaggagaccguugaaccuggaggggcccuag

SEQ ID NO: 533074 - RNA, 22 nt, Human
uuaggagacgcugcacuugaca

SEQ ID NO: 533075 - RNA, 32 nt, Human
uuaggagagcugaggccagcugcccacugagu

SEQ ID NO: 533076 - RNA, 32 nt, Human
uuaggagaggauccuugcucccaacgucuacu

SEQ ID NO: 533077 - RNA, 32 nt, Human
uuaggagagugggaagaaaggagcagagagag

SEQ ID NO: 533078 - RNA, 31 nt, Human
uuaggagaugagagagugaagggcugaccca

SEQ ID NO: 533079 - RNA, 32 nt, Human
uuaggagccuagggugucuccucugcuucugg

SEQ ID NO: 533080 - RNA, 32 nt, Human
uuaggagcucaguugagaaacaguuccauuca

SEQ ID NO: 533081 - RNA, 32 nt, Human
uuaggagcuccagguugggagcagugacagag

SEQ ID NO: 533082 - RNA, 32 nt, Human
uuaggagcuuagcucaaaguucagcuaaccuu

SEQ ID NO: 533083 - RNA, 32 nt, Human
uuaggagcuucaaacacauauaauuucucaag

SEQ ID NO: 533084 - RNA, 32 nt, Human
uuaggaggagcacgcgucccgcucgggcgcac

SEQ ID NO: 533085 - RNA, 32 nt, Human
uuaggaggagugagacaggugauaauggaucc

SEQ ID NO: 533086 - RNA, 32 nt, Human
uuaggaggaugucggggugaagggugguaucu

SEQ ID NO: 533087 - RNA, 32 nt, Human
uuaggaggccaaagcaggaggaucgcuugagc

SEQ ID NO: 533088 - RNA, 32 nt, Human
uuaggaggccaaggcagguggaucaugagauc

SEQ ID NO: 533089 - RNA, 32 nt, Human
uuaggaggccaaggcagguggaucgcuugagg

SEQ ID NO: 533090 - RNA, 32 nt, Human
uuaggaggccgaggcaggcggaucacuuaaga

SEQ ID NO: 533091 - RNA, 32 nt, Human
uuaggaggccgaggcggguggaucaugagguc

SEQ ID NO: 533092 - RNA, 32 nt, Human
uuaggaggccgagguggguggaucaugagguc

SEQ ID NO: 533093 - RNA, 32 nt, Human
uuaggaggccugauucacagacgcuacaggau

SEQ ID NO: 533094 - RNA, 32 nt, Human
uuaggaggcuagagagucaaggagaaccucaa

SEQ ID NO: 533095 - RNA, 32 nt, Human
uuaggaggcugaagcaggaggauugauugagc

SEQ ID NO: 533096 - RNA, 32 nt, Human
uuaggaggcugaggcaggagaaucacaucaac

SEQ ID NO: 533097 - RNA, 32 nt, Human
uuaggaggcugaggcaggagaaucgcuugaau

SEQ ID NO: 533098 - RNA, 32 nt, Human
uuaggaggcugaggcaggagaaucucuugaaa

SEQ ID NO: 533099 - RNA, 32 nt, Human
uuaggaggcugaggcaggaggaucauuugagc

SEQ ID NO: 533100 - RNA, 32 nt, Human
uuaggaggcugaggcaugagaaucacuuaaac

SEQ ID NO: 533101 - RNA, 32 nt, Human
uuaggaggcugaggcugguggaucacuugaag

SEQ ID NO: 533102 - RNA, 32 nt, Human
uuaggaggcugagguaggagaauugcuugaac

SEQ ID NO: 533103 - RNA, 32 nt, Human
uuaggaggcugagguaggagaauugcuugacc

SEQ ID NO: 533104 - RNA, 32 nt, Human
uuaggaggcugaggugggagaaucacuuggac

SEQ ID NO: 533105 - RNA, 32 nt, Human
uuaggaggcugagguuggagaaucgcuugagg

SEQ ID NO: 533106 - RNA, 32 nt, Human
uuaggaggcugaugcaggagaauuguuugaac

SEQ ID NO: 533107 - RNA, 32 nt, Human
uuaggagggaaugagccucagggaggagugag

SEQ ID NO: 533108 - RNA, 32 nt, Human
uuaggagguuuguuucagaccucugugggccg

SEQ ID NO: 533109 - RNA, 32 nt, Human
uuaggagucacugcuugugugguuccugggac

SEQ ID NO: 533110 - RNA, 32 nt, Human
uuaggagugagcuuggugagggcuccaaucug

SEQ ID NO: 533111 - RNA, 32 nt, Human
uuaggagugcuuccucacaguuaccaagaaua

SEQ ID NO: 533112 - RNA, 32 nt, Human
uuaggaguuugagaccagccugggcaacaugg

SEQ ID NO: 533113 - RNA, 32 nt, Human
uuaggaguuugagacuagccugggcaacccag

SEQ ID NO: 533114 - RNA, 32 nt, Human
uuaggauacagcucccuccuccaggcagccuu

SEQ ID NO: 533115 - RNA, 32 nt, Human
uuaggauacuuaacaaauacauucaaauucuu

SEQ ID NO: 533116 - RNA, 32 nt, Human
uuaggauaggagaaaggguucaugcacacacg

SEQ ID NO: 533117 - RNA, 32 nt, Human
uuaggauauuuucauacacauaggguaucuug

SEQ ID NO: 533118 - RNA, 32 nt, Human
uuaggauccaaagcuucucugcuccuuuuguu

SEQ ID NO: 533119 - RNA, 32 nt, Human
uuaggaucuccauggugggaaggaaggcaggc

SEQ ID NO: 533120 - RNA, 32 nt, Human
uuaggaugagccaccagaauaugccugcucaa

SEQ ID NO: 533121 - RNA, 32 nt, Human
uuaggaugcaggcuggguaugguggcucaugc

SEQ ID NO: 533122 - RNA, 32 nt, Human
uuaggaugccugcucugugcucucccugccuc

SEQ ID NO: 533123 - RNA, 32 nt, Human
uuaggauggaagggaacucugcacaaaaccuu

SEQ ID NO: 533124 - RNA, 32 nt, Human
uuaggauuucaacauaugaauuuuggaaggac

SEQ ID NO: 533125 - RNA, 32 nt, Human
uuaggauuugaacaauggagagaugaucauga

SEQ ID NO: 533126 - RNA, 32 nt, Human
uuaggauuuguucugcucagagcaccaccagg

SEQ ID NO: 533127 - RNA, 32 nt, Human
uuaggcaacacggugaaaccccaucucuacaa

SEQ ID NO: 533128 - RNA, 32 nt, Human
uuaggcaagggcccaaggacagugccuuaguu

SEQ ID NO: 533129 - RNA, 32 nt, Human
uuaggcacaagaaagcuaccauuuuuaacagu

SEQ ID NO: 533130 - RNA, 32 nt, Human
uuaggcacugcuaaucaagcaugaagaggaac

SEQ ID NO: 533131 - RNA, 32 nt, Human
uuaggcacuguguggaaaguguuaagggguag

SEQ ID NO: 533132 - RNA, 23 nt, Human
uuaggcacuguucuaaauauuaa

SEQ ID NO: 533133 - RNA, 32 nt, Human
uuaggcagccuggagaaaaccagagauccagu

SEQ ID NO: 533134 - RNA, 32 nt, Human
uuaggcagggccucuggcuggggccaggguua

SEQ ID NO: 533135 - RNA, 20 nt, Human
uuaggcaguaucauuuccau

SEQ ID NO: 533136 - RNA, 32 nt, Human
uuaggcauagggcugaacaguccuuccagagc

SEQ ID NO: 533137 - RNA, 23 nt, Human
uuaggcauauguaguaauauuag

SEQ ID NO: 533138 - RNA, 32 nt, Human
uuaggcauggguggaaagugcucagugaagua

SEQ ID NO: 533139 - RNA, 23 nt, Human
uuaggcauuaguuuggcaauaug

SEQ ID NO: 533140 - RNA, 23 nt, Human
uuaggcauuggcaucauuauuag

SEQ ID NO: 533141 - RNA, 32 nt, Human
uuaggccaccuucucccuuuccuggaccccag

SEQ ID NO: 533142 - RNA, 32 nt, Human
uuaggccacuggcuuagaguacuccuuccccu

SEQ ID NO: 533143 - RNA, 32 nt, Human
uuaggccaggagaugaaggaguucaguagcaa

SEQ ID NO: 533144 - RNA, 32 nt, Human
uuaggccagggugggagcagugaacggaguca

SEQ ID NO: 533145 - RNA, 32 nt, Human
uuaggccauugcacuccagccucagcaacaag

SEQ ID NO: 533146 - RNA, 32 nt, Human
uuaggcccagaguuggagaccaaccugggcaa

SEQ ID NO: 533147 - RNA, 32 nt, Human
uuaggcccagcaccaaauauucaccaucccuu

SEQ ID NO: 533148 - RNA, 32 nt, Human
uuaggcccagcaccaaauauucaccauccguu

SEQ ID NO: 533149 - RNA, 32 nt, Human
uuaggcccaguucaugcuaaaagauggacucu

SEQ ID NO: 533150 - RNA, 32 nt, Human
uuaggcccccaucauccucuggcuuggccaca

SEQ ID NO: 533151 - RNA, 32 nt, Human
uuaggccccucaggacccagggaaugccaggg

SEQ ID NO: 533152 - RNA, 32 nt, Human
uuaggcccugcacuccaccuggggacggcccc

SEQ ID NO: 533153 - RNA, 32 nt, Human
uuaggccucccaacuucuccccaggccaagua

SEQ ID NO: 533154 - RNA, 32 nt, Human
uuaggccugcaccugcccauccagaaagcagc

SEQ ID NO: 533155 - RNA, 32 nt, Human
uuaggccugccuccccaggacuccuuagaucc

SEQ ID NO: 533156 - RNA, 32 nt, Human
uuaggccuggaagguugaggcugcuauaagcu

SEQ ID NO: 533157 - RNA, 32 nt, Human
uuaggccuggggagccauagggcuggcuucuc

SEQ ID NO: 533158 - RNA, 32 nt, Human
uuaggccuuggcuugauggaagugggccaguc

SEQ ID NO: 533159 - RNA, 32 nt, Human
uuaggccuuugaucuuccucucuaguguauaa

SEQ ID NO: 533160 - RNA, 32 nt, Human
uuaggccuuuugacuccagcugagggggacag

SEQ ID NO: 533161 - RNA, 32 nt, Human
uuaggcgacuccugguguucgccccggacaag

SEQ ID NO: 533162 - RNA, 32 nt, Human
uuaggcggagagcgccgggcagagggggaggg

SEQ ID NO: 533163 - RNA, 32 nt, Human
uuaggcggauugggucucucugcuguggcguu

SEQ ID NO: 533164 - RNA, 32 nt, Human
uuaggcgggagaaucacuugaacccaggaggu

SEQ ID NO: 533165 - RNA, 32 nt, Human
uuaggcgggaggaucacuugaguccaggaguu

SEQ ID NO: 533166 - RNA, 32 nt, Human
uuaggcgugguugagaaaaagcagaaacuuua

SEQ ID NO: 533167 - RNA, 32 nt, Human
uuaggcguuccagaccagccugggcaacauag

SEQ ID NO: 533168 - RNA, 32 nt, Human
uuaggcuaggaauucaagaccagccuggccaa

SEQ ID NO: 533169 - RNA, 32 nt, Human
uuaggcucauaguuuguggaaaaaucccaaua

SEQ ID NO: 533170 - RNA, 32 nt, Human
uuaggcucuccaaggacacuuguggacaucac

SEQ ID NO: 533171 - RNA, 32 nt, Human
uuaggcugaacugucucuuauagaaugagguc

SEQ ID NO: 533172 - RNA, 32 nt, Human
uuaggcugcagcuugccacuccugggcugggu

SEQ ID NO: 533173 - RNA, 32 nt, Human
uuaggcugccauuccagagaaggaggaaaugc

SEQ ID NO: 533174 - RNA, 32 nt, Human
uuaggcuggagugcaguggcacgaucauagcu

SEQ ID NO: 533175 - RNA, 32 nt, Human
uuaggcuggcaggccggcugaggggcgcgggc

SEQ ID NO: 533176 - RNA, 31 nt, Human
uuaggcuuauagucucccauaguugagauug

SEQ ID NO: 533177 - RNA, 32 nt, Human
uuaggcuucaaacuuguacgacaugucacugu

SEQ ID NO: 533178 - RNA, 32 nt, Human
uuaggcuugaugacccagaaucuaggauucuc

SEQ ID NO: 533179 - RNA, 32 nt, Human
uuaggcuugcugucuccuaaggucacccaagc

SEQ ID NO: 533180 - RNA, 32 nt, Human
uuaggcuuggcgcgguggcucacgcauguaau

SEQ ID NO: 533181 - RNA, 31 nt, Human
uuagggaacaggguugacacagcagggcuag

SEQ ID NO: 533182 - RNA, 32 nt, Human
uuagggaacaucagcaagacccaucccaggag

SEQ ID NO: 533183 - RNA, 32 nt, Human
uuagggaagggagccauugagcacagacuuug

SEQ ID NO: 533184 - RNA, 32 nt, Human
uuagggaagugaguagcugaucaacaccuuaa

SEQ ID NO: 533185 - RNA, 32 nt, Human
uuagggacacagauuguggcgccgugauggaa

SEQ ID NO: 533186 - RNA, 32 nt, Human
uuagggacaggcucguguuguccaguuugccc

SEQ ID NO: 533187 - RNA, 32 nt, Human
uuagggacugauuuuuaauucugacacccaca

SEQ ID NO: 533188 - RNA, 32 nt, Human
uuagggacuguaguggauuauggccaagcagc

SEQ ID NO: 533189 - RNA, 32 nt, Human
uuagggagauuugcauucaggccagggauuug

SEQ ID NO: 533190 - RNA, 32 nt, Human
uuagggagcagugccuuucagaauuucagaau

SEQ ID NO: 533191 - RNA, 32 nt, Human
uuagggagcccaaauggcuacagaucugguaa

SEQ ID NO: 533192 - RNA, 32 nt, Human
uuagggagcgggagcaaggggccuuccgagga

SEQ ID NO: 533193 - RNA, 32 nt, Human
uuagggaggaagaaaugaugucugagcugaau

SEQ ID NO: 533194 - RNA, 32 nt, Human
uuagggaggaagaggcaggcgaugagucuagu

SEQ ID NO: 533195 - RNA, 32 nt, Human
uuagggaggcuaagcagucucuguuuugcuuc

SEQ ID NO: 533196 - RNA, 32 nt, Human
uuagggagggcuguggagccgggaaccaagac

SEQ ID NO: 533197 - RNA, 32 nt, Human
uuagggaggguugaugggggaggcguggggaa

SEQ ID NO: 533198 - RNA, 23 nt, Human
uuagggaucacacaacuuacuua

SEQ ID NO: 533199 - RNA, 32 nt, Human
uuagggcagagggagcugggcagggcacagca

SEQ ID NO: 533200 - RNA, 32 nt, Human
uuagggcagggaggggacuggggaagugcgca

SEQ ID NO: 533201 - RNA, 32 nt, Human
uuagggcccugccucuguuucaugaugcaugg

SEQ ID NO: 533202 - RNA, 32 nt, Human
uuagggccgagugggagcgcagagccccuccc

SEQ ID NO: 533203 - RNA, 32 nt, Human
uuagggccgggacaucccgaggagccgcggug

SEQ ID NO: 533204 - RNA, 32 nt, Human
uuagggccuacccuggagugcugcagugugug

SEQ ID NO: 533205 - RNA, 32 nt, Human
uuagggccuuuccaagauugcuguuuuuguuu

SEQ ID NO: 533206 - RNA, 32 nt, Human
uuagggcgugagccaccgcgcccagcuucugg

SEQ ID NO: 533207 - RNA, 32 nt, Human
uuagggcucaauuuccugauuguaguagaggu

SEQ ID NO: 533208 - RNA, 32 nt, Human
uuagggcuggaaggcagcaucccucugacagg

SEQ ID NO: 533209 - RNA, 32 nt, Human
uuagggcuucagccugugaauaugagacucac

SEQ ID NO: 533210 - RNA, 32 nt, Human
uuaggggaaggagagagggaagggucagggua

SEQ ID NO: 533211 - RNA, 32 nt, Human
uuaggggacagggugagcagguuuggaggcaa

SEQ ID NO: 533212 - RNA, 32 nt, Human
uuaggggacuccugagguccuaucuccaggcu

SEQ ID NO: 533213 - RNA, 31 nt, Human
uuaggggagaaacugccucagugccauuuaa

SEQ ID NO: 533214 - RNA, 32 nt, Human
uuaggggaggagaaggagagguuauaccuuca

SEQ ID NO: 533215 - RNA, 32 nt, Human
uuaggggaggcaggcaggugggugagcagcag

SEQ ID NO: 533216 - RNA, 32 nt, Human
uuaggggagggcagaggccugcaguuuggcuu

SEQ ID NO: 533217 - RNA, 32 nt, Human
uuaggggauguggggaccaggagaaagucagg

SEQ ID NO: 533218 - RNA, 32 nt, Human
uuaggggccagccugccuccaccucccacccc

SEQ ID NO: 533219 - RNA, 32 nt, Human
uuagggggagggaagcugaaaucauugaugua

SEQ ID NO: 533220 - RNA, 32 nt, Human
uuagggggauuauaaaacuaaucaucaaagcc

SEQ ID NO: 533221 - RNA, 31 nt, Human
uuagggguaauaaauacuuggcuuggaaauu

SEQ ID NO: 533222 - RNA, 32 nt, Human
uuaggguacaagaagccuguucuguccagcuu

SEQ ID NO: 533223 - RNA, 32 nt, Human
uuaggguaccggaagcagaaccccugggcuga

SEQ ID NO: 533224 - RNA, 32 nt, Human
uuaggguagugguucucaucuaccuuggagug

SEQ ID NO: 533225 - RNA, 32 nt, Human
uuagggucauucuccuuaauaggcuuuuaugu

SEQ ID NO: 533226 - RNA, 32 nt, Human
uuaggguccugcugucugucauguugccuugu

SEQ ID NO: 533227 - RNA, 32 nt, Human
uuagggucucuggcccuguucuugccccagca

SEQ ID NO: 533228 - RNA, 32 nt, Human
uuagggugagaucugcuguaccagucucacag

SEQ ID NO: 533229 - RNA, 32 nt, Human
uuaggguggugccaccacugcagacuauugug

SEQ ID NO: 533230 - RNA, 32 nt, Human
uuagggugucauugucauuugagagacugaca

SEQ ID NO: 533231 - RNA, 32 nt, Human
uuaggguguguauccaacccagugcuuccuaa

SEQ ID NO: 533232 - RNA, 32 nt, Human
uuaggguuauguuuuuaggauuccccucaaug

SEQ ID NO: 533233 - RNA, 32 nt, Human
uuaggguucacaguuggacaaaaugaguuuga

SEQ ID NO: 533234 - RNA, 32 nt, Human
uuaggguuugcagaguggaaacucagccguag

SEQ ID NO: 533235 - RNA, 32 nt, Human
uuaggguuugcgacuccgccucccugggaccu

SEQ ID NO: 533236 - RNA, 32 nt, Human
uuaggguuuuucaggcugggcacagugacuca

SEQ ID NO: 533237 - RNA, 32 nt, Human
uuagguaacguauuggaccugcccacaacucc

SEQ ID NO: 533238 - RNA, 32 nt, Human
uuagguaacuauugugucuuccuucacuaucu

SEQ ID NO: 533239 - RNA, 32 nt, Human
uuagguacaaugcaugcaucacagacuguauu

SEQ ID NO: 533240 - RNA, 32 nt, Human
uuagguagcaagacauauugaaugcaaaguuc

SEQ ID NO: 533241 - RNA, 32 nt, Human
uuagguagccccggaaaggucgggaggaggag

SEQ ID NO: 533242 - RNA, 32 nt, Human
uuaggucagaaguucaagaucagccugggcaa

SEQ ID NO: 533243 - RNA, 32 nt, Human
uuaggucagcacuugauucguuguugcuguga

SEQ ID NO: 533244 - RNA, 32 nt, Human
uuaggucaggaguucaacgccagccuggccaa

SEQ ID NO: 533245 - RNA, 32 nt, Human
uuaggucagugacugaagggaccaagaacgca

SEQ ID NO: 533246 - RNA, 32 nt, Human
uuaggucauuuauuaauuuucuuacaggugca

SEQ ID NO: 533247 - RNA, 32 nt, Human
uuagguccugcugccccugcugccucagcccu

SEQ ID NO: 533248 - RNA, 32 nt, Human
uuaggucucauggaccaguggcuggucucacc

SEQ ID NO: 533249 - RNA, 32 nt, Human
uuaggucugguguggcuuauucuucuagcugc

SEQ ID NO: 533250 - RNA, 32 nt, Human
uuaggucugugauccaggcuucagcagacaau

SEQ ID NO: 533251 - RNA, 32 nt, Human
uuaggugaaagaacuagcagaaagucaaaaac

SEQ ID NO: 533252 - RNA, 32 nt, Human
uuaggugacauggugacaucuaucccuuuauu

SEQ ID NO: 533253 - RNA, 32 nt, Human
uuaggugaucgagggugugcccagggggcgga

SEQ ID NO: 533254 - RNA, 32 nt, Human
uuaggugcuugggaacacaaugcucccaguuc

SEQ ID NO: 533255 - RNA, 32 nt, Human
uuagguggaaucgcugugcaugugcaggaaug

SEQ ID NO: 533256 - RNA, 31 nt, Human
uuagguggacuuuucugagaucuuguagaaa

SEQ ID NO: 533257 - RNA, 32 nt, Human
uuagguggaguuucacucuguugcccaggcug

SEQ ID NO: 533258 - RNA, 32 nt, Human
uuagguggcgucucacccuauugcccaggcug

SEQ ID NO: 533259 - RNA, 32 nt, Human
uuagguggcugagacagguggaucaugagguc

SEQ ID NO: 533260 - RNA, 32 nt, Human
uuaggugggaaacagcuggagacucugggaug

SEQ ID NO: 533261 - RNA, 32 nt, Human
uuaggugggcggggcuccugagggagcuccaa

SEQ ID NO: 533262 - RNA, 32 nt, Human
uuaggugggggaggggcgacaguagugagcgc

SEQ ID NO: 533263 - RNA, 32 nt, Human
uuagguguaacgagaagagauccucagcagaa

SEQ ID NO: 533264 - RNA, 32 nt, Human
uuagguguaguggcaggcaccuguaaucccag

SEQ ID NO: 533265 - RNA, 32 nt, Human
uuaggugugcagaagcuuuccuuucccuaccc

SEQ ID NO: 533266 - RNA, 32 nt, Human
uuaggugugguggcucacaccuguaaucccag

SEQ ID NO: 533267 - RNA, 32 nt, Human
uuagguguugagauggggcagcucugaauccu

SEQ ID NO: 533268 - RNA, 32 nt, Human
uuagguuaaaucugaauuuccacugcuuugga

SEQ ID NO: 533269 - RNA, 32 nt, Human
uuagguuaauuuucuaguaaaacacguugccu

SEQ ID NO: 533270 - RNA, 32 nt, Human
uuagguuccaggaacuuccugagaacacccga

SEQ ID NO: 533271 - RNA, 32 nt, Human
uuagguucccagaggacugagggaauccugua

SEQ ID NO: 533272 - RNA, 32 nt, Human
uuagguuccccuggacuccagccaaggcuguu

SEQ ID NO: 533273 - RNA, 32 nt, Human
uuagguuccuuaucucuccugagccuugggcu

SEQ ID NO: 533274 - RNA, 32 nt, Human
uuagguucuugaguaguucugcucuuaaacgu

SEQ ID NO: 533275 - RNA, 32 nt, Human
uuagguuucugcuggucucugcccccugugac

SEQ ID NO: 533276 - RNA, 32 nt, Human
uuagguuuuuccccaucuccuguagagcgaau

SEQ ID NO: 533277 - RNA, 32 nt, Human
uuaguaaaaggaguaacaaacaagauugugau

SEQ ID NO: 533278 - RNA, 32 nt, Human
uuaguaaagacaggguuucaccauguuggcca

SEQ ID NO: 533279 - RNA, 32 nt, Human
uuaguaaagacaggguuucaccguguuagcca

SEQ ID NO: 533280 - RNA, 32 nt, Human
uuaguaaagacaggguuucaucauguuggccu

SEQ ID NO: 533281 - RNA, 32 nt, Human
uuaguaaagacaggguuucuccauguugguca

SEQ ID NO: 533282 - RNA, 32 nt, Human
uuaguaaauaaauacauuacauuuuuguauuu

SEQ ID NO: 533283 - RNA, 23 nt, Human
uuaguaaauuagaacuccuaccu

SEQ ID NO: 533284 - RNA, 32 nt, Human
uuaguaaccuuaaauuuuagugaaaaccuagg

SEQ ID NO: 533285 - RNA, 32 nt, Human
uuaguaagacuagacaguaacagaagccaguu

SEQ ID NO: 533286 - RNA, 32 nt, Human
uuaguaaggcauuugggguuggggaagcuaga

SEQ ID NO: 533287 - RNA, 32 nt, Human
uuaguaaguugcugauuuauggugcuaaagaa

SEQ ID NO: 533288 - RNA, 32 nt, Human
uuaguaauaagaauacagggaaaugucuucag

SEQ ID NO: 533289 - RNA, 31 nt, Human
uuaguaaucgucucugacaugccaaacaccc

SEQ ID NO: 533290 - RNA, 32 nt, Human
uuaguaaugacaggguuucaccguguuggcca

SEQ ID NO: 533291 - RNA, 32 nt, Human
uuaguaauggcagagcagucuaaacagagucc

SEQ ID NO: 533292 - RNA, 32 nt, Human
uuaguaauucaggucuggaauggggcuuagga

SEQ ID NO: 533293 - RNA, 32 nt, Human
uuaguaauuuaaaucagaaauauuuuauaaaa

SEQ ID NO: 533294 - RNA, 32 nt, Human
uuaguacagacaggguuucacuguguuagcca

SEQ ID NO: 533295 - RNA, 32 nt, Human
uuaguacagacaggguuugacuauguuggcca

SEQ ID NO: 533296 - RNA, 32 nt, Human
uuaguacagccacauaaugugccaucuauugu

SEQ ID NO: 533297 - RNA, 32 nt, Human
uuaguacaugggagggcuagccccgggacuug

SEQ ID NO: 533298 - RNA, 32 nt, Human
uuaguaccaguagaauggggugcugcugaaaa

SEQ ID NO: 533299 - RNA, 32 nt, Human
uuaguacccugcaggccaggccagcuuccccu

SEQ ID NO: 533300 - RNA, 32 nt, Human
uuaguaccuuacuguagacagaguguggguga

SEQ ID NO: 533301 - RNA, 31 nt, Human
uuaguacucaauaaacaaugcauugaaugag

SEQ ID NO: 533302 - RNA, 32 nt, Human
uuaguacucucaucucugguuccauuccaguu

SEQ ID NO: 533303 - RNA, 32 nt, Human
uuaguacugaggaauuuucaugugccacauac

SEQ ID NO: 533304 - RNA, 32 nt, Human
uuaguacuggaauagagguggccaggccccca

SEQ ID NO: 533305 - RNA, 32 nt, Human
uuaguacuuguaaauaaacacacacauuaagg

SEQ ID NO: 533306 - RNA, 32 nt, Human
uuaguagaaacgagguuucaacauguuggcca

SEQ ID NO: 533307 - RNA, 32 nt, Human
uuaguagaaacgagguuucaccacguuggcca

SEQ ID NO: 533308 - RNA, 32 nt, Human
uuaguagacgucuucauucauuggaguaacug

SEQ ID NO: 533309 - RNA, 32 nt, Human
uuaguagagacagaguuucaccauguuggcca

SEQ ID NO: 533310 - RNA, 32 nt, Human
uuaguagagacagaguuucgccauguuggcca

SEQ ID NO: 533311 - RNA, 32 nt, Human
uuaguagagacagaguuuuaccauguuggcca

SEQ ID NO: 533312 - RNA, 32 nt, Human
uuaguagagacagaguuuugccauguuggcca

SEQ ID NO: 533313 - RNA, 32 nt, Human
uuaguagagacagaguuuugcuauguuggcca

SEQ ID NO: 533314 - RNA, 32 nt, Human
uuaguagagacagaguuuugcuguguugguca

SEQ ID NO: 533315 - RNA, 32 nt, Human
uuaguagagacagcguuucaccauguuagcca

SEQ ID NO: 533316 - RNA, 32 nt, Human
uuaguagagacagcguuucaccauguuagcua

SEQ ID NO: 533317 - RNA, 32 nt, Human
uuaguagagacaggaucucccuauguugucca

SEQ ID NO: 533318 - RNA, 32 nt, Human
uuaguagagacaggauuucaccauguuggcca

SEQ ID NO: 533319 - RNA, 32 nt, Human
uuaguagagacaggauuucacuauguuggcca

SEQ ID NO: 533320 - RNA, 32 nt, Human
uuaguagagacaggauuucaucauguuggcca

SEQ ID NO: 533321 - RNA, 32 nt, Human
uuaguagagacaggauuucuccauguugguca

SEQ ID NO: 533322 - RNA, 32 nt, Human
uuaguagagacaggauuuuaccauguuggcca

SEQ ID NO: 533323 - RNA, 32 nt, Human
uuaguagagacaggauuuugccauguuugcca

SEQ ID NO: 533324 - RNA, 32 nt, Human
uuaguagagacaggcuuucgcuguguuggcca

SEQ ID NO: 533325 - RNA, 32 nt, Human
uuaguagagacagggcuucaccauguuggcaa

SEQ ID NO: 533326 - RNA, 32 nt, Human
uuaguagagacagggcuucaccauguuggcua

SEQ ID NO: 533327 - RNA, 32 nt, Human
uuaguagagacagggguuucuuccauguugcc

SEQ ID NO: 533328 - RNA, 32 nt, Human
uuaguagagacagggucucaccauguuggcca

SEQ ID NO: 533329 - RNA, 32 nt, Human
uuaguagagacaggguucuuaccauguuggcc

SEQ ID NO: 533330 - RNA, 32 nt, Human
uuaguagagacaggguuucaccaugucaagcu

SEQ ID NO: 533331 - RNA, 32 nt, Human
uuaguagagacaggguuucaccaugucagcca

SEQ ID NO: 533332 - RNA, 32 nt, Human
uuaguagagacaggguuucaccaugugagcca

SEQ ID NO: 533333 - RNA, 32 nt, Human
uuaguagagacaggguuucaccauguuagcca

SEQ ID NO: 533334 - RNA, 32 nt, Human
uuaguagagacaggguuucaccauguuagccg

SEQ ID NO: 533335 - RNA, 32 nt, Human
uuaguagagacaggguuucaccauguuaguca

SEQ ID NO: 533336 - RNA, 32 nt, Human
uuaguagagacaggguuucaccauguugccca

SEQ ID NO: 533337 - RNA, 32 nt, Human
uuaguagagacaggguuucaccauguugccua

SEQ ID NO: 533338 - RNA, 32 nt, Human
uuaguagagacaggguuucaccauguuggaca

SEQ ID NO: 533339 - RNA, 32 nt, Human
uuaguagagacaggguuucaccauguuggcca

SEQ ID NO: 533340 - RNA, 32 nt, Human
uuaguagagacaggguuucaccauguuggccg

SEQ ID NO: 533341 - RNA, 32 nt, Human
uuaguagagacaggguuucaccauguugguca

SEQ ID NO: 533342 - RNA, 32 nt, Human
uuaguagagacaggguuucaccauguuggucg

SEQ ID NO: 533343 - RNA, 32 nt, Human
uuaguagagacaggguuucaccauguugguua

SEQ ID NO: 533344 - RNA, 32 nt, Human
uuaguagagacaggguuucaccauguugucca

SEQ ID NO: 533345 - RNA, 32 nt, Human
uuaguagagacaggguuucaccauguuugcca

SEQ ID NO: 533346 - RNA, 32 nt, Human
uuaguagagacaggguuucaccguguuaacca

SEQ ID NO: 533347 - RNA, 32 nt, Human
uuaguagagacaggguuucaccguguuagcca

SEQ ID NO: 533348 - RNA, 32 nt, Human
uuaguagagacaggguuucaccguguuggcga

SEQ ID NO: 533349 - RNA, 32 nt, Human
uuaguagagacaggguuucaccguguugguca

SEQ ID NO: 533350 - RNA, 32 nt, Human
uuaguagagacaggguuucacuaugcugguca

SEQ ID NO: 533351 - RNA, 32 nt, Human
uuaguagagacaggguuucacuauguuggcca

SEQ ID NO: 533352 - RNA, 32 nt, Human
uuaguagagacaggguuucacuguguuagcca

SEQ ID NO: 533353 - RNA, 32 nt, Human
uuaguagagacaggguuucacuguguugccca

SEQ ID NO: 533354 - RNA, 32 nt, Human
uuaguagagacaggguuucauaauguaaguca

SEQ ID NO: 533355 - RNA, 32 nt, Human
uuaguagagacaggguuucaucauguuggcca

SEQ ID NO: 533356 - RNA, 32 nt, Human
uuaguagagacaggguuucaucauuguuggcc

SEQ ID NO: 533357 - RNA, 32 nt, Human
uuaguagagacaggguuucauuauguuggcca

SEQ ID NO: 533358 - RNA, 32 nt, Human
uuaguagagacaggguuuccacauguuggcca

SEQ ID NO: 533359 - RNA, 32 nt, Human
uuaguagagacaggguuucgcaauguuggcca

SEQ ID NO: 533360 - RNA, 32 nt, Human
uuaguagagacaggguuucgccauguuggcca

SEQ ID NO: 533361 - RNA, 32 nt, Human
uuaguagagacaggguuucgccauguuggcua

SEQ ID NO: 533362 - RNA, 32 nt, Human
uuaguagagacaggguuucuccaugucgguca

SEQ ID NO: 533363 - RNA, 32 nt, Human
uuaguagagacaggguuucuccauguugguca

SEQ ID NO: 533364 - RNA, 32 nt, Human
uuaguagagacaggguuucuccauguuggucg

SEQ ID NO: 533365 - RNA, 32 nt, Human
uuaguagagacaggguuucuccauguugguua

SEQ ID NO: 533366 - RNA, 32 nt, Human
uuaguagagacaggguuucuucauguugguca

SEQ ID NO: 533367 - RNA, 32 nt, Human
uuaguagagacaggguuuuaccauguuggcca

SEQ ID NO: 533368 - RNA, 32 nt, Human
uuaguagagacaggguuuuaccauguugguca

SEQ ID NO: 533369 - RNA, 32 nt, Human
uuaguagagacaggguuuuaccguguuagcca

SEQ ID NO: 533370 - RNA, 32 nt, Human
uuaguagagacaggguuuugccauguuagaca

SEQ ID NO: 533371 - RNA, 32 nt, Human
uuaguagagacaggguuuugccauguugccca

SEQ ID NO: 533372 - RNA, 32 nt, Human
uuaguagagacaggguuuugccauguuggcca

SEQ ID NO: 533373 - RNA, 32 nt, Human
uuaguagagacaggguuuugccguguuggcca

SEQ ID NO: 533374 - RNA, 32 nt, Human
uuaguagagacagguuucaccauauuggccag

SEQ ID NO: 533375 - RNA, 32 nt, Human
uuaguagagacagguuuucaccauguuagcca

SEQ ID NO: 533376 - RNA, 32 nt, Human
uuaguagagacagguuuucaccauguuggcca

SEQ ID NO: 533377 - RNA, 32 nt, Human
uuaguagagacagguuuucaccauguuggcga

SEQ ID NO: 533378 - RNA, 32 nt, Human
uuaguagagacaguguuuaccauguuggccag

SEQ ID NO: 533379 - RNA, 32 nt, Human
uuaguagagacaguguuucaccauguugacca

SEQ ID NO: 533380 - RNA, 32 nt, Human
uuaguagagacaguguuucaccauguuggcca

SEQ ID NO: 533381 - RNA, 32 nt, Human
uuaguagagacaguguuucgccauguuggcca

SEQ ID NO: 533382 - RNA, 32 nt, Human
uuaguagagacaguguuuugccauguuggcca

SEQ ID NO: 533383 - RNA, 32 nt, Human
uuaguagagacgagguuucaacauguuggcca

SEQ ID NO: 533384 - RNA, 32 nt, Human
uuaguagagacgggguucaccauguuggccag

SEQ ID NO: 533385 - RNA, 32 nt, Human
uuaguagagacggguuucaccauauugaccag

SEQ ID NO: 533386 - RNA, 32 nt, Human
uuaguagagacggguuucaccgugucggccag

SEQ ID NO: 533387 - RNA, 32 nt, Human
uuaguagagacggguuucaucauguuagccag

SEQ ID NO: 533388 - RNA, 32 nt, Human
uuaguagagacugguuucuccauguuggucag

SEQ ID NO: 533389 - RNA, 32 nt, Human
uuaguagagacugucccuucugccuucgggcg

SEQ ID NO: 533390 - RNA, 32 nt, Human
uuaguagagagagguuucaccauguuagccag

SEQ ID NO: 533391 - RNA, 32 nt, Human
uuaguagagagggguuucacaguguugggcag

SEQ ID NO: 533392 - RNA, 32 nt, Human
uuaguagagauagggucucaccauguuggcca

SEQ ID NO: 533393 - RNA, 32 nt, Human
uuaguagagaugaguuucaccauguuggucag

SEQ ID NO: 533394 - RNA, 32 nt, Human
uuaguagagaugggguuucaccauggccaggc

SEQ ID NO: 533395 - RNA, 32 nt, Human
uuaguagagaugggguuucaccauggcuaggc

SEQ ID NO: 533396 - RNA, 32 nt, Human
uuaguagagaugggguuucaccuuguugggug

SEQ ID NO: 533397 - RNA, 32 nt, Human
uuaguagagauggguuucaccauguuggccau

SEQ ID NO: 533398 - RNA, 32 nt, Human
uuaguagagauggguuucuccauguuggucgg

SEQ ID NO: 533399 - RNA, 32 nt, Human
uuaguagagcuggguuucaccauguuggccag

SEQ ID NO: 533400 - RNA, 32 nt, Human
uuaguagaguaggguuuggccauguuggccag

SEQ ID NO: 533401 - RNA, 32 nt, Human
uuaguagaucccuagacauggaaucagggcag

SEQ ID NO: 533402 - RNA, 32 nt, Human
uuaguagcauugaggucucacuauguugcaca

SEQ ID NO: 533403 - RNA, 32 nt, Human
uuaguagcgacaggguuguaccauguuggcca

SEQ ID NO: 533404 - RNA, 32 nt, Human
uuaguagcggagcguguugauccugccugaag

SEQ ID NO: 533405 - RNA, 32 nt, Human
uuaguaggcaggaagaggcggagggagagcuc

SEQ ID NO: 533406 - RNA, 32 nt, Human
uuaguagggaugggguuucccauguuggccag

SEQ ID NO: 533407 - RNA, 32 nt, Human
uuaguaguuuauuacuucacuugaggguacuu

SEQ ID NO: 533408 - RNA, 32 nt, Human
uuaguauagcucccccuuccccuucugggaaa

SEQ ID NO: 533409 - RNA, 32 nt, Human
uuaguauauagugaauacagaaacaucagcau

SEQ ID NO: 533410 - RNA, 32 nt, Human
uuaguaucaggagcacugagcucacagacuga

SEQ ID NO: 533411 - RNA, 32 nt, Human
uuaguauccuguuaggggaaaauaguagcaga

SEQ ID NO: 533412 - RNA, 32 nt, Human
uuaguaucugauuuuagaugaucacucuuuca

SEQ ID NO: 533413 - RNA, 32 nt, Human
uuaguauggaauuaaggaauuaaguuugguga

SEQ ID NO: 533414 - RNA, 32 nt, Human
uuaguauucaucucuuugaaucauuugcucaa

SEQ ID NO: 533415 - RNA, 32 nt, Human
uuaguauuccucauucugcauccuggcuugaa

SEQ ID NO: 533416 - RNA, 32 nt, Human
uuaguauucucaccacauuucguuuagucuac

SEQ ID NO: 533417 - RNA, 32 nt, Human
uuaguauugagcuguugccucucugaguacuc

SEQ ID NO: 533418 - RNA, 32 nt, Human
uuaguauuuaacuacaucugccucggcucaca

SEQ ID NO: 533419 - RNA, 32 nt, Human
uuaguauuuagacucuggauaacucuacaaua

SEQ ID NO: 533420 - RNA, 32 nt, Human
uuaguauuuauagaauaugaccuauuuaucug

SEQ ID NO: 533421 - RNA, 32 nt, Human
uuaguauuugcuggauaugcagggagaugaga

SEQ ID NO: 533422 - RNA, 32 nt, Human
uuagucaaguagaggcaaugcaaagauucaca

SEQ ID NO: 533423 - RNA, 23 nt, Human
uuagucaaguauaggggcugcca

SEQ ID NO: 533424 - RNA, 32 nt, Human
uuagucacggcacugcagccugggcaacauag

SEQ ID NO: 533425 - RNA, 27 nt, Human
uuagucagcucagaaacacccaucuua

SEQ ID NO: 533426 - RNA, 32 nt, Human
uuagucaggacucagaaaauuugagcuuaguu

SEQ ID NO: 533427 - RNA, 32 nt, Human
uuagucaggaggaucucuugagccugggaggu

SEQ ID NO: 533428 - RNA, 32 nt, Human
uuagucaggcuauccugacaagacuugaccua

SEQ ID NO: 533429 - RNA, 32 nt, Human
uuagucaucuggaacaaagacuaaaaacagca

SEQ ID NO: 533430 - RNA, 32 nt, Human
uuagucaucuuccuacagcaccaucuagacau

SEQ ID NO: 533431 - RNA, 32 nt, Human
uuagucauuuugcuucauagcugguuccugcu

SEQ ID NO: 533432 - RNA, 32 nt, Human
uuaguccagaacagccccagcauugucaaacu

SEQ ID NO: 533433 - RNA, 32 nt, Human
uuaguccaggaguuuugagaccagccugggca

SEQ ID NO: 533434 - RNA, 32 nt, Human
uuaguccaguugguuucuuucuuucucuuacc

SEQ ID NO: 533435 - RNA, 22 nt, Human
uuaguccauucucacacugcua

SEQ ID NO: 533436 - RNA, 32 nt, Human
uuagucccacggucuccugcaucagcugguga

SEQ ID NO: 533437 - RNA, 32 nt, Human
uuagucccccugagccucaagguugccacaug

SEQ ID NO: 533438 - RNA, 32 nt, Human
uuagucccuaucuggguaagggucuucccuug

SEQ ID NO: 533439 - RNA, 32 nt, Human
uuagucccuccagaccucggcuuuagugcugu

SEQ ID NO: 533440 - RNA, 32 nt, Human
uuagucccugaacaggagugaugccuccaggc

SEQ ID NO: 533441 - RNA, 22 nt, Human
uuaguccguucucacacugcua

SEQ ID NO: 533442 - RNA, 32 nt, Human
uuaguccugaggcgcugggaauagcugauccu

SEQ ID NO: 533443 - RNA, 32 nt, Human
uuaguccuggagacccagccuccagggacuga

SEQ ID NO: 533444 - RNA, 32 nt, Human
uuaguccuggaguucaagucuaaauguugaug

SEQ ID NO: 533445 - RNA, 29 nt, Human
uuaguccuggcccagcccagagcugggac

SEQ ID NO: 533446 - RNA, 32 nt, Human
uuaguccuguaacuuuauugggugauauuuug

SEQ ID NO: 533447 - RNA, 32 nt, Human
uuaguccuuaucucccuacggggcuugccuug

SEQ ID NO: 533448 - RNA, 32 nt, Human
uuaguccuuugucuaaguagggccagggcacc

SEQ ID NO: 533449 - RNA, 32 nt, Human
uuagucgagacggguuucaccacguuggccag

SEQ ID NO: 533450 - RNA, 32 nt, Human
uuagucgaggguggguggggccugggaaucug

SEQ ID NO: 533451 - RNA, 32 nt, Human
uuagucgggaggcugaggcaggagaauaugga

SEQ ID NO: 533452 - RNA, 32 nt, Human
uuagucguuggaggcuggagcgcaauggcccu

SEQ ID NO: 533453 - RNA, 32 nt, Human
uuagucuaaagaaagaaagacaaaaguagucg

SEQ ID NO: 533454 - RNA, 32 nt, Human
uuagucuaacucugcauagacagggucuagau

SEQ ID NO: 533455 - RNA, 32 nt, Human
uuagucuauacccaccaccucccuucauaacc

SEQ ID NO: 533456 - RNA, 32 nt, Human
uuagucucacccaaugugauuuguagaagcac

SEQ ID NO: 533457 - RNA, 32 nt, Human
uuagucucauuucucucccucccuucuucccu

SEQ ID NO: 533458 - RNA, 21 nt, Human
uuagucuccaggaggcugcca

SEQ ID NO: 533459 - RNA, 32 nt, Human
uuagucuccagugucuccuauuacaaagaagc

SEQ ID NO: 533460 - RNA, 32 nt, Human
uuagucucccaaaaugcugggauuacaggagu

SEQ ID NO: 533461 - RNA, 32 nt, Human
uuagucucccaaagugcuaggauuacagcgug

SEQ ID NO: 533462 - RNA, 32 nt, Human
uuagucuccuaaagugcugggauuacaugugu

SEQ ID NO: 533463 - RNA, 32 nt, Human
uuagucucugcagucucuugucuugaauuaau

SEQ ID NO: 533464 - RNA, 32 nt, Human
uuagucucuuuucuacaaucuucuucagaaag

SEQ ID NO: 533465 - RNA, 32 nt, Human
uuagucucuuuuguccuugugagagcugggug

SEQ ID NO: 533466 - RNA, 32 nt, Human
uuagucuggaaagacuuuguuuaaaugaaagg

SEQ ID NO: 533467 - RNA, 32 nt, Human
uuagucugucucaaagcucuauauguuuacau

SEQ ID NO: 533468 - RNA, 22 nt, Human
uuagucuguucucaugcugcua

SEQ ID NO: 533469 - RNA, 26 nt, Human
uuagucuuacccagugaaucauucug

SEQ ID NO: 533470 - RNA, 32 nt, Human
uuagucuucaucugaauuucaggcugggaggg

SEQ ID NO: 533471 - RNA, 32 nt, Human
uuagucuucccuuuguuauaugacuuuauagg

SEQ ID NO: 533472 - RNA, 32 nt, Human
uuagucuuccuaaaggacaaaauaaacaguau

SEQ ID NO: 533473 - RNA, 32 nt, Human
uuagucuucucccccuucccuggggcuucuag

SEQ ID NO: 533474 - RNA, 32 nt, Human
uuagucuucuuccagaaacagagaaggggaug

SEQ ID NO: 533475 - RNA, 32 nt, Human
uuagucuugugagcguuuuuacaccggguaga

SEQ ID NO: 533476 - RNA, 32 nt, Human
uuagucuugugcugacuuucuccuguccucuu

SEQ ID NO: 533477 - RNA, 32 nt, Human
uuagucuuguuucccaggcuggagugcaaugg

SEQ ID NO: 533478 - RNA, 32 nt, Human
uuagugaaccaaaaauagaaauuagauuugug

SEQ ID NO: 533479 - RNA, 32 nt, Human
uuagugaacugcugcugcuguucagacuuuuu

SEQ ID NO: 533480 - RNA, 32 nt, Human
uuagugaagguaauuccaaaauacugguauca

SEQ ID NO: 533481 - RNA, 32 nt, Human
uuagugacauaaaauauuuucucuauuuuccc

SEQ ID NO: 533482 - RNA, 32 nt, Human
uuagugagacuagacauaguaccgaauuuagu

SEQ ID NO: 533483 - RNA, 32 nt, Human
uuagugagagcugacuggcaagauaaaaaccc

SEQ ID NO: 533484 - RNA, 32 nt, Human
uuagugagugcggcuaaguccccagcccccuc

SEQ ID NO: 533485 - RNA, 32 nt, Human
uuagugaucccuccugcugucucuuuccuuuu

SEQ ID NO: 533486 - RNA, 32 nt, Human
uuagugauccugcuugcccuguggaaagaccu

SEQ ID NO: 533487 - RNA, 32 nt, Human
uuagugaucuguugcaagauaacuuggaauua

SEQ ID NO: 533488 - RNA, 32 nt, Human
uuagugaugacucugaaagcauugaagaaagu

SEQ ID NO: 533489 - RNA, 32 nt, Human
uuagugauucuucacaauuccuccaggaugac

SEQ ID NO: 533490 - RNA, 32 nt, Human
uuagugcagagcagggguggucaggcugaacg

SEQ ID NO: 533491 - RNA, 32 nt, Human
uuagugcaucuucuccaagaagggccguucau

SEQ ID NO: 533492 - RNA, 32 nt, Human
uuagugcaugcccuacccucugggggaacguc

SEQ ID NO: 533493 - RNA, 32 nt, Human
uuagugcauggucggggcaggaacuggugcau

SEQ ID NO: 533494 - RNA, 32 nt, Human
uuagugccauuagguauguauguauguaacuu

SEQ ID NO: 533495 - RNA, 32 nt, Human
uuagugcccuuauuuaaaaaggccccagagag

SEQ ID NO: 533496 - RNA, 32 nt, Human
uuagugccuagaguuaagagacaaauguuuac

SEQ ID NO: 533497 - RNA, 32 nt, Human
uuagugccucuuaguccaucuguucccucucc

SEQ ID NO: 533498 - RNA, 32 nt, Human
uuagugccuugaucuuggacuucccagugucu

SEQ ID NO: 533499 - RNA, 32 nt, Human
uuagugccuuguaaucuaacuuugucacugug

SEQ ID NO: 533500 - RNA, 32 nt, Human
uuagugcugcaccacucggacauggcuaauuc

SEQ ID NO: 533501 - RNA, 32 nt, Human
uuagugcugcugcaaagaugagccgaagacca

SEQ ID NO: 533502 - RNA, 32 nt, Human
uuagugcuggacugguacccuuguagaagcca

SEQ ID NO: 533503 - RNA, 32 nt, Human
uuaguggaaauggauucaugaaauauauuaaa

SEQ ID NO: 533504 - RNA, 32 nt, Human
uuaguggaauuccacaccaacagggcuuguga

SEQ ID NO: 533505 - RNA, 32 nt, Human
uuaguggagacaggauuuuaccauguuggcca

SEQ ID NO: 533506 - RNA, 32 nt, Human
uuaguggagacagguuucaccauguuggccag

SEQ ID NO: 533507 - RNA, 32 nt, Human
uuaguggauacuugggcuacuuccaccuuuug

SEQ ID NO: 533508 - RNA, 32 nt, Human
uuaguggaucucaaacuugucuuaaaucaaca

SEQ ID NO: 533509 - RNA, 32 nt, Human
uuaguggcaccagaguaacucuagucaguuac

SEQ ID NO: 533510 - RNA, 32 nt, Human
uuaguggcacggugcuugggccuguguccccg

SEQ ID NO: 533511 - RNA, 32 nt, Human
uuaguggcaggaggaggaguuaaggugaucuu

SEQ ID NO: 533512 - RNA, 32 nt, Human
uuaguggcugccacuucugccgcagcaggccc

SEQ ID NO: 533513 - RNA, 32 nt, Human
uuaguggcuguuccagaaucucugccugagaa

SEQ ID NO: 533514 - RNA, 32 nt, Human
uuaguggcuguuuucugucuucccaggaagcc

SEQ ID NO: 533515 - RNA, 32 nt, Human
uuaguggcuuccaacagccaucaggaguguuu

SEQ ID NO: 533516 - RNA, 32 nt, Human
uuaguggcuugcccucugccugccucagcugc

SEQ ID NO: 533517 - RNA, 32 nt, Human
uuagugggagaaucagagagagcuguaguguc

SEQ ID NO: 533518 - RNA, 32 nt, Human
uuaguggguuagcgggucugaccucagcccca

SEQ ID NO: 533519 - RNA, 32 nt, Human
uuagugguagagcgaccuuuucaauuacaaag

SEQ ID NO: 533520 - RNA, 31 nt, Human
uuaguggugacagagcacaaagacugaagau

SEQ ID NO: 533521 - RNA, 32 nt, Human
uuaguggugacugguuucugccuaccacuucc

SEQ ID NO: 533522 - RNA, 32 nt, Human
uuaguggugcuugcagucacaggaagcagcag

SEQ ID NO: 533523 - RNA, 32 nt, Human
uuagugguggccauuuagccaccaucuuugca

SEQ ID NO: 533524 - RNA, 32 nt, Human
uuagugguucagaaagguaaccucaagaagaa

SEQ ID NO: 533525 - RNA, 32 nt, Human
uuaguguaaaaaugagaacauguugguauuua

SEQ ID NO: 533526 - RNA, 32 nt, Human
uuaguguaaaaguacaugcagaaagaugaaac

SEQ ID NO: 533527 - RNA, 32 nt, Human
uuaguguaauaagcuggcuacacagaacccca

SEQ ID NO: 533528 - RNA, 32 nt, Human
uuaguguagcacucaugcugaaguaaacauga

SEQ ID NO: 533529 - RNA, 32 nt, Human
uuagugucaaaagugagaugcugagaguaggu

SEQ ID NO: 533530 - RNA, 32 nt, Human
uuagugucucaaagugcugggauuacagguau

SEQ ID NO: 533531 - RNA, 32 nt, Human
uuagugucuccagucaagcucuggguacugaa

SEQ ID NO: 533532 - RNA, 32 nt, Human
uuaguguguuccccuuuguggguggguuccua

SEQ ID NO: 533533 - RNA, 32 nt, Human
uuaguguuaaaagaaaaguuugcugaaaaagu

SEQ ID NO: 533534 - RNA, 32 nt, Human
uuaguguucaaaacauugaaacacucuucacc

SEQ ID NO: 533535 - RNA, 32 nt, Human
uuaguguucauagcuuccaagagacaugcuga

SEQ ID NO: 533536 - RNA, 32 nt, Human
uuaguguuccaaguagcugggauuacagacgc

SEQ ID NO: 533537 - RNA, 32 nt, Human
uuaguguugggcugcaagguugguucaguaua

SEQ ID NO: 533538 - RNA, 32 nt, Human
uuaguguuugacauugcuuccucugccacaaa

SEQ ID NO: 533539 - RNA, 32 nt, Human
uuaguuaaagugugacuuucagaaagggaaaa

SEQ ID NO: 533540 - RNA, 32 nt, Human
uuaguuaacccucccugccuuuucuuaacaaa

SEQ ID NO: 533541 - RNA, 32 nt, Human
uuaguuaaccugaaagauuccaaaaauuguuc

SEQ ID NO: 533542 - RNA, 32 nt, Human
uuaguuaaguauauggauaaaaaguuaugaac

SEQ ID NO: 533543 - RNA, 32 nt, Human
uuaguuaccaggagaaaugugugacaccuaua

SEQ ID NO: 533544 - RNA, 32 nt, Human
uuaguuagagucuaaugaaacucucaucuagu

SEQ ID NO: 533545 - RNA, 32 nt, Human
uuaguuauuccuuucuuuacccaccuaaacua

SEQ ID NO: 533546 - RNA, 21 nt, Human
uuaguuauuucuggguuguca

SEQ ID NO: 533547 - RNA, 32 nt, Human
uuaguucaagccccagccuaggaaagccaguu

SEQ ID NO: 533548 - RNA, 32 nt, Human
uuaguucacugcaacuuccgcuucccagguuc

SEQ ID NO: 533549 - RNA, 32 nt, Human
uuaguucagagcagagccugaugccugagauc

SEQ ID NO: 533550 - RNA, 32 nt, Human
uuaguucauauguacacuagccagugguugug

SEQ ID NO: 533551 - RNA, 22 nt, Human
uuaguucauugucacacugcua

SEQ ID NO: 533552 - RNA, 32 nt, Human
uuaguuccccuccccuccccucccucuuuuua

SEQ ID NO: 533553 - RNA, 32 nt, Human
uuaguuccgcccuccuguccaucaggagaagg

SEQ ID NO: 533554 - RNA, 21 nt, Human
uuaguuccuuuuucaggcuca

SEQ ID NO: 533555 - RNA, 32 nt, Human
uuaguucggucugcaagacgguuuucccagug

SEQ ID NO: 533556 - RNA, 32 nt, Human
uuaguucuacaaaaaucagcugaaaucaugaa

SEQ ID NO: 533557 - RNA, 32 nt, Human
uuaguucucacaccugcacuuaccagcaucca

SEQ ID NO: 533558 - RNA, 32 nt, Human
uuaguucucaucuagaaugaaaguuccauaua

SEQ ID NO: 533559 - RNA, 32 nt, Human
uuaguucuuccagguugaauccugggcagaaa

SEQ ID NO: 533560 - RNA, 32 nt, Human
uuaguucuugcuuagggaaaaugccagguaug

SEQ ID NO: 533561 - RNA, 32 nt, Human
uuaguucuuuucuccccuugaggucaguaaua

SEQ ID NO: 533562 - RNA, 32 nt, Human
uuaguugacccugauggggacccguaggguaa

SEQ ID NO: 533563 - RNA, 32 nt, Human
uuaguugacuaauucuuccucccauuccccuc

SEQ ID NO: 533564 - RNA, 32 nt, Human
uuaguugaguuugucugaagaccugggauuuu

SEQ ID NO: 533565 - RNA, 32 nt, Human
uuaguugcugcacuccagccuaggcaacauag

SEQ ID NO: 533566 - RNA, 32 nt, Human
uuaguuggaagacuucacgaagacugcugaua

SEQ ID NO: 533567 - RNA, 32 nt, Human
uuaguuggaguucucauuuuuauucuccagua

SEQ ID NO: 533568 - RNA, 32 nt, Human
uuaguuggaugggguuucaccauguuagccag

SEQ ID NO: 533569 - RNA, 32 nt, Human
uuaguugggaaaauacuuguuuuuccaaauuc

SEQ ID NO: 533570 - RNA, 32 nt, Human
uuaguugggggcuguccagagcugcagcaggg

SEQ ID NO: 533571 - RNA, 32 nt, Human
uuaguuggucccuauguuggaaguaaaaagug

SEQ ID NO: 533572 - RNA, 32 nt, Human
uuaguugguuuggguggggccugagauucugc

SEQ ID NO: 533573 - RNA, 23 nt, Human
uuaguuguucagcaacugucuua

SEQ ID NO: 533574 - RNA, 32 nt, Human
uuaguuuacagaauggaaccaaaauguauaaa

SEQ ID NO: 533575 - RNA, 32 nt, Human
uuaguuuaccccuuggcuuuguguucuugcau

SEQ ID NO: 533576 - RNA, 32 nt, Human
uuaguuuagacuauuguaggaauggaaggaaa

SEQ ID NO: 533577 - RNA, 32 nt, Human
uuaguuuagcgugagauugcagauguuaccau

SEQ ID NO: 533578 - RNA, 32 nt, Human
uuaguuucaaagcuuauucuuaauuagagaca

SEQ ID NO: 533579 - RNA, 32 nt, Human
uuaguuucuccaagcaggacauggacaaggau

SEQ ID NO: 533580 - RNA, 32 nt, Human
uuaguuugaguuuuuaaaaacuaggaagacag

SEQ ID NO: 533581 - RNA, 31 nt, Human
uuaguuugccucuccccaucuuugucucccu

SEQ ID NO: 533582 - RNA, 32 nt, Human
uuaguuugccuggagcuugaaaggagaaagca

SEQ ID NO: 533583 - RNA, 32 nt, Human
uuaguuugccuguaauacauggauauuuuuaa

SEQ ID NO: 533584 - RNA, 32 nt, Human
uuaguuugcucaucuaugaucugagaucaugc

SEQ ID NO: 533585 - RNA, 32 nt, Human
uuaguuuggaaagaauagaagaaggaauagau

SEQ ID NO: 533586 - RNA, 32 nt, Human
uuaguuuggccugggcuucucagcuuguccag

SEQ ID NO: 533587 - RNA, 32 nt, Human
uuaguuuggggaggggaagcauuuuuaagugu

SEQ ID NO: 533588 - RNA, 32 nt, Human
uuaguuuuaguuuucuggaauagcuaguauug

SEQ ID NO: 533589 - RNA, 32 nt, Human
uuaguuuuccacucugccccggggagcacccu

SEQ ID NO: 533590 - RNA, 32 nt, Human
uuaguuuucccuuuuuccuuuuuaauaugagu

SEQ ID NO: 533591 - RNA, 32 nt, Human
uuaguuuucucagagaaguggagggaggagga

SEQ ID NO: 533592 - RNA, 32 nt, Human
uuaguuuugaugaugcacaaaauaaacagcag

SEQ ID NO: 533593 - RNA, 32 nt, Human
uuaguuuugcagaagaacacuguuguaguuua

SEQ ID NO: 533594 - RNA, 31 nt, Human
uuaguuuuggauuucuuuacuguuucuaaua

SEQ ID NO: 533595 - RNA, 32 nt, Human
uuaguuuugugcuuaguuaaaucuuuuccagg

SEQ ID NO: 533596 - RNA, 32 nt, Human
uuaguuuuguggcuuacugcugcuccacccag

SEQ ID NO: 533597 - RNA, 32 nt, Human
uuaguuuuucugagguagugcaucccauuaaa

SEQ ID NO: 533598 - RNA, 32 nt, Human
uuaguuuuugcauauguaguacacuuaugcau

SEQ ID NO: 533599 - RNA, 32 nt, Human
uuauaaaaagccuuaaguggaaaguguuccag

SEQ ID NO: 533600 - RNA, 32 nt, Human
uuauaaaaaguuaagaaaaagcauuagaggcu

SEQ ID NO: 533601 - RNA, 32 nt, Human
uuauaaaaauauucauguacuaccacaguaua

SEQ ID NO: 533602 - RNA, 32 nt, Human
uuauaaaacccaagaguaggaaccugacaacc

SEQ ID NO: 533603 - RNA, 32 nt, Human
uuauaaaacucauguguacuacuuaaguuuau

SEQ ID NO: 533604 - RNA, 32 nt, Human
uuauaaaacuuguuggaauuuuuacggcuuuu

SEQ ID NO: 533605 - RNA, 32 nt, Human
uuauaaaaggaaaauaaagggcauaaugauug

SEQ ID NO: 533606 - RNA, 32 nt, Human
uuauaaaagggaauagagaagagaugggacua

SEQ ID NO: 533607 - RNA, 32 nt, Human
uuauaaaauaaggaaguaacaugugaggcucu

SEQ ID NO: 533608 - RNA, 32 nt, Human
uuauaaaauagggaaugaaugaaugaauaugg

SEQ ID NO: 533609 - RNA, 32 nt, Human
uuauaaaauuccugccucucccuaacacagga

SEQ ID NO: 533610 - RNA, 32 nt, Human
uuauaaacacaugcacuuuuguuuuguuuuug

SEQ ID NO: 533611 - RNA, 32 nt, Human
uuauaaacagaagugacugauguucccuccgg

SEQ ID NO: 533612 - RNA, 32 nt, Human
uuauaaaccagcaaugucaucugugaggaagc

SEQ ID NO: 533613 - RNA, 32 nt, Human
uuauaaaccccuccaaucuacuagucaagaga

SEQ ID NO: 533614 - RNA, 32 nt, Human
uuauaaacccucuccagccucucccaaaggaa

SEQ ID NO: 533615 - RNA, 32 nt, Human
uuauaaacucacuguaaucaaaucuuauaaaa

SEQ ID NO: 533616 - RNA, 32 nt, Human
uuauaaagaagagguuuaauuggcucacgguu

SEQ ID NO: 533617 - RNA, 32 nt, Human
uuauaaagaauaaagaaaucaccagaacugcc

SEQ ID NO: 533618 - RNA, 32 nt, Human
uuauaaagacaggguuuuuccauguugcccag

SEQ ID NO: 533619 - RNA, 32 nt, Human
uuauaaagagcccaguugucuccuugugacau

SEQ ID NO: 533620 - RNA, 32 nt, Human
uuauaaagaguuauacccugaagaauuugaaa

SEQ ID NO: 533621 - RNA, 32 nt, Human
uuauaaagaugguaguaagucaauacauuuau

SEQ ID NO: 533622 - RNA, 32 nt, Human
uuauaaagauuuuaccuagaaauaauguauuu

SEQ ID NO: 533623 - RNA, 32 nt, Human
uuauaaagugugccacauggacuuaccgagca

SEQ ID NO: 533624 - RNA, 32 nt, Human
uuauaaauagauuccccacgcaggugguggca

SEQ ID NO: 533625 - RNA, 32 nt, Human
uuauaaauaugagaaugcagcacacaaagaga

SEQ ID NO: 533626 - RNA, 32 nt, Human
uuauaaauggcagaagagugacaaaauucauu

SEQ ID NO: 533627 - RNA, 32 nt, Human
uuauaaauggugcugaagcaggacccgaagcc

SEQ ID NO: 533628 - RNA, 32 nt, Human
uuauaaauguacaaauaguuacugaaaugacg

SEQ ID NO: 533629 - RNA, 32 nt, Human
uuauaaauuauaggagguuuugguuuucuuuu

SEQ ID NO: 533630 - RNA, 32 nt, Human
uuauaacaaaaacuuuguggauuucauaaaaa

SEQ ID NO: 533631 - RNA, 32 nt, Human
uuauaacacuaaaacuggacagucuccugaga

SEQ ID NO: 533632 - RNA, 32 nt, Human
uuauaaccaaagccaauuaagaucuuaaaacc

SEQ ID NO: 533633 - RNA, 32 nt, Human
uuauaaccaguuuuugauugguaauuguuuuc

SEQ ID NO: 533634 - RNA, 32 nt, Human
uuauaaccuugaguugaugaaacucugaggca

SEQ ID NO: 533635 - RNA, 32 nt, Human
uuauaaccuuuuaaauagaggcugcuuuucca

SEQ ID NO: 533636 - RNA, 32 nt, Human
uuauaacggugaauuauaccuuugugcaugcc

SEQ ID NO: 533637 - RNA, 32 nt, Human
uuauaacucagccuuuaggaacaccggagaac

SEQ ID NO: 533638 - RNA, 32 nt, Human
uuauaacugaucauauuacuguauuuguauug

SEQ ID NO: 533639 - RNA, 32 nt, Human
uuauaacugauuuuuaaaaugcuguuuuucag

SEQ ID NO: 533640 - RNA, 32 nt, Human
uuauaacuuauccauaugcaugauggaaaaau

SEQ ID NO: 533641 - RNA, 32 nt, Human
uuauaagaaaaauuauguacacagcuuauuuu

SEQ ID NO: 533642 - RNA, 32 nt, Human
uuauaagaaaugacauuuauggaacacuuauu

SEQ ID NO: 533643 - RNA, 32 nt, Human
uuauaagaucuacccuuauggccaggugcagu

SEQ ID NO: 533644 - RNA, 32 nt, Human
uuauaagcaaaaguugguugccuagggaacaa

SEQ ID NO: 533645 - RNA, 32 nt, Human
uuauaagcacacacaagauacaugguggaaga

SEQ ID NO: 533646 - RNA, 32 nt, Human
uuauaagcagaggauauuacccacuucagaga

SEQ ID NO: 533647 - RNA, 32 nt, Human
uuauaagcagcuguauccccuuugccauggug

SEQ ID NO: 533648 - RNA, 32 nt, Human
uuauaagcagcuucccccuuugcucaguauca

SEQ ID NO: 533649 - RNA, 32 nt, Human
uuauaagcccaagucauuuuacauuugcuuuu

SEQ ID NO: 533650 - RNA, 32 nt, Human
uuauaagccuuugccagguguaacuguuguga

SEQ ID NO: 533651 - RNA, 32 nt, Human
uuauaagcugagaccgguggcucucuucuuaa

SEQ ID NO: 533652 - RNA, 32 nt, Human
uuauaagcuuuacauccucccauguuguccug

SEQ ID NO: 533653 - RNA, 32 nt, Human
uuauaaggaggcauuaacacagcaguuaaaga

SEQ ID NO: 533654 - RNA, 32 nt, Human
uuauaaggagggcuggccaaucucugcccagg

SEQ ID NO: 533655 - RNA, 31 nt, Human
uuauaaggcaguagagaaaaacuguuggguu

SEQ ID NO: 533656 - RNA, 32 nt, Human
uuauaagggcccugcccuguacugaagaaaag

SEQ ID NO: 533657 - RNA, 32 nt, Human
uuauaagggguuuccccuuuugcuuagcucuc

SEQ ID NO: 533658 - RNA, 32 nt, Human
uuauaaggucccuagauaucccagaaccugcc

SEQ ID NO: 533659 - RNA, 32 nt, Human
uuauaagucaagccauggaauuugaacuuuau

SEQ ID NO: 533660 - RNA, 32 nt, Human
uuauaaguccccaaaaguugaauauuggaaau

SEQ ID NO: 533661 - RNA, 32 nt, Human
uuauaagucuguguccuuuucuugaguacuga

SEQ ID NO: 533662 - RNA, 32 nt, Human
uuauaagugauggauagcagaaagggagaacu

SEQ ID NO: 533663 - RNA, 32 nt, Human
uuauaaguggguuuuaaaaaguugcagugggc

SEQ ID NO: 533664 - RNA, 32 nt, Human
uuauaauaaaaaggaaggacaggaggaagaca

SEQ ID NO: 533665 - RNA, 32 nt, Human
uuauaauaagagacuugaagcugggugugacg

SEQ ID NO: 533666 - RNA, 32 nt, Human
uuauaauaauugcaccuaccucccagggguaa

SEQ ID NO: 533667 - RNA, 32 nt, Human
uuauaauacuguuuuaaaaugugaggcaauaa

SEQ ID NO: 533668 - RNA, 32 nt, Human
uuauaauaggccuucuauauuuccuugucuuu

SEQ ID NO: 533669 - RNA, 32 nt, Human
uuauaauagguggggaaauucaggaaacaucc

SEQ ID NO: 533670 - RNA, 32 nt, Human
uuauaauauucagcaaaagugaaagacuugug

SEQ ID NO: 533671 - RNA, 32 nt, Human
uuauaauccccgaaguuaaaucuugcuguuau

SEQ ID NO: 533672 - RNA, 32 nt, Human
uuauaauccucaauuaugaaccaccuuguuua

SEQ ID NO: 533673 - RNA, 32 nt, Human
uuauaaucgaugucauuguauguuuucuuuaa

SEQ ID NO: 533674 - RNA, 32 nt, Human
uuauaaucuuccauacuucuucauucaauaca

SEQ ID NO: 533675 - RNA, 32 nt, Human
uuauaaugcauuuuacucccaguauuauguuc

SEQ ID NO: 533676 - RNA, 32 nt, Human
uuauaaugggugggggcuaccacccacccucu

SEQ ID NO: 533677 - RNA, 32 nt, Human
uuauaaugucuucauuuauuuagcaugcaaau

SEQ ID NO: 533678 - RNA, 32 nt, Human
uuauaauucagucugcuuuuggauuuucauau

SEQ ID NO: 533679 - RNA, 32 nt, Human
uuauaauucugcaauccucuugcucaggaagu

SEQ ID NO: 533680 - RNA, 32 nt, Human
uuauaauucugccucuagccaaaugcuauguu

SEQ ID NO: 533681 - RNA, 32 nt, Human
uuauaauuucuuuccaaagauaccaaauaaac

SEQ ID NO: 533682 - RNA, 32 nt, Human
uuauacaaagcccuccagccuguuuguggggc

SEQ ID NO: 533683 - RNA, 32 nt, Human
uuauacaaauaccauguaauguguacauauuu

SEQ ID NO: 533684 - RNA, 32 nt, Human
uuauacaaggggauguacacagcccugcuuua

SEQ ID NO: 533685 - RNA, 32 nt, Human
uuauacaaguuagaaaacaaaaauagagugug

SEQ ID NO: 533686 - RNA, 32 nt, Human
uuauacaauaaauaaaugaaauauugugcuga

SEQ ID NO: 533687 - RNA, 32 nt, Human
uuauacaauacaauuuguuucuauuuugaggc

SEQ ID NO: 533688 - RNA, 32 nt, Human
uuauacaauucuuuacuuaauucuaccagccu

SEQ ID NO: 533689 - RNA, 32 nt, Human
uuauacacucccuuccauucaggauuuucugc

SEQ ID NO: 533690 - RNA, 32 nt, Human
uuauacacuuggauuucauuuguaacuuuagg

SEQ ID NO: 533691 - RNA, 32 nt, Human
uuauacagaccccagccccauucccaucuacu

SEQ ID NO: 533692 - RNA, 32 nt, Human
uuauacagagcugacucaaaaagacaaaaagu

SEQ ID NO: 533693 - RNA, 32 nt, Human
uuauacagcucuuuuccgggaacucacccagg

SEQ ID NO: 533694 - RNA, 32 nt, Human
uuauacaggagguagcuuggugggagugaaac

SEQ ID NO: 533695 - RNA, 32 nt, Human
uuauacaggggguucuagccagugcaugaaga

SEQ ID NO: 533696 - RNA, 32 nt, Human
uuauacagguucaucaguacugugucuugaga

SEQ ID NO: 533697 - RNA, 32 nt, Human
uuauacauaaucaagauccugccucuacggaa

SEQ ID NO: 533698 - RNA, 32 nt, Human
uuauacaucucuucagggaagagagaaccaau

SEQ ID NO: 533699 - RNA, 32 nt, Human
uuauacaugagacuaugguuggacuuccuuuu

SEQ ID NO: 533700 - RNA, 32 nt, Human
uuauacauguauccuaaaaagagaagcucaug

SEQ ID NO: 533701 - RNA, 32 nt, Human
uuauacauuccugaaacauuuucaucuguauc

SEQ ID NO: 533702 - RNA, 32 nt, Human
uuauaccaaacaguaaucagauuccauuggaa

SEQ ID NO: 533703 - RNA, 20 nt, Human
uuauaccaacaacuguuuca

SEQ ID NO: 533704 - RNA, 32 nt, Human
uuauaccaauguuugaaaguaauuggguguua

SEQ ID NO: 533705 - RNA, 32 nt, Human
uuauaccacauaccacacauagccacagaaac

SEQ ID NO: 533706 - RNA, 32 nt, Human
uuauaccacaugcaaaaauguccauaugcacu

SEQ ID NO: 533707 - RNA, 32 nt, Human
uuauaccacugcacuccagccugggugacaga

SEQ ID NO: 533708 - RNA, 32 nt, Human
uuauaccagcacuuugggaggcugaaguggga

SEQ ID NO: 533709 - RNA, 32 nt, Human
uuauaccaguauccccuucauuacaguaaacu

SEQ ID NO: 533710 - RNA, 32 nt, Human
uuauaccauacagacacagcaacuuaggaaga

SEQ ID NO: 533711 - RNA, 32 nt, Human
uuauaccauggaugcuaaaaaugguucuaacu

SEQ ID NO: 533712 - RNA, 32 nt, Human
uuauacccagugaggaugcugcagugaggcug

SEQ ID NO: 533713 - RNA, 32 nt, Human
uuauacccuccccuuguuuucuugcuuuauuc

SEQ ID NO: 533714 - RNA, 32 nt, Human
uuauacccuccugacuuguucuccccuuccuu

SEQ ID NO: 533715 - RNA, 32 nt, Human
uuauaccuagaaaaacaccacaggggaacagg

SEQ ID NO: 533716 - RNA, 18 nt, Human
uuauaccuauugucuaua

SEQ ID NO: 533717 - RNA, 32 nt, Human
uuauaccuguaauccuagcacuuugggaggcu

SEQ ID NO: 533718 - RNA, 32 nt, Human
uuauaccuguugcuauuuugcaaagaaauaau

SEQ ID NO: 533719 - RNA, 32 nt, Human
uuauacggagucucgcucugucacccaggcug

SEQ ID NO: 533720 - RNA, 32 nt, Human
uuauacuaaugagcuaauggggucauugccau

SEQ ID NO: 533721 - RNA, 32 nt, Human
uuauacuaaugugccaaguaaauguucauugc

SEQ ID NO: 533722 - RNA, 32 nt, Human
uuauacuacagaaaugagaaucucaucaauaa

SEQ ID NO: 533723 - RNA, 32 nt, Human
uuauacuacauaguacccaccucuccaaaugc

SEQ ID NO: 533724 - RNA, 32 nt, Human
uuauacuacuuccugucauaaccuucuaacuu

SEQ ID NO: 533725 - RNA, 32 nt, Human
uuauacuauuucaacuagaccccacaccaggg

SEQ ID NO: 533726 - RNA, 32 nt, Human
uuauacucaacuuacuguuuagaaaauguggc

SEQ ID NO: 533727 - RNA, 31 nt, Human
uuauacucacucaaggcagugcaagaucuug

SEQ ID NO: 533728 - RNA, 32 nt, Human
uuauacucauaaggucaguguacagacccaag

SEQ ID NO: 533729 - RNA, 32 nt, Human
uuauacuccaacaauucaugagcaacaguaua

SEQ ID NO: 533730 - RNA, 32 nt, Human
uuauacucuccaaagcccucaggcuggaauga

SEQ ID NO: 533731 - RNA, 32 nt, Human
uuauacugcacuuuaguguauuuucugucacu

SEQ ID NO: 533732 - RNA, 32 nt, Human
uuauacugcagggcaucuugugaauauguaug

SEQ ID NO: 533733 - RNA, 32 nt, Human
uuauacugcauggagucuuucuuuaauuuagg

SEQ ID NO: 533734 - RNA, 32 nt, Human
uuauacugcuuaaaauacaguuagugccuauu

SEQ ID NO: 533735 - RNA, 32 nt, Human
uuauacugggauaguccucucugcuuuucaga

SEQ ID NO: 533736 - RNA, 32 nt, Human
uuauacugggggugaggggacaagaaagccau

SEQ ID NO: 533737 - RNA, 32 nt, Human
uuauacugugugccaggcacugugggaaaugc

SEQ ID NO: 533738 - RNA, 32 nt, Human
uuauacuguugauuacuuucaguauuaauaua

SEQ ID NO: 533739 - RNA, 32 nt, Human
uuauacuuaaugaucauuuccaaaggagacca

SEQ ID NO: 533740 - RNA, 32 nt, Human
uuauacuuaauuauaggguuguaauguuuaua

SEQ ID NO: 533741 - RNA, 32 nt, Human
uuauacuuagucaaauguaauguggcuucugg

SEQ ID NO: 533742 - RNA, 32 nt, Human
uuauacuucauuugugaguuaugaauguuuuu

SEQ ID NO: 533743 - RNA, 32 nt, Human
uuauacuucucuucauucuuuuaaggccuugc

SEQ ID NO: 533744 - RNA, 32 nt, Human
uuauacuugccugguacucaugauagaccccu

SEQ ID NO: 533745 - RNA, 32 nt, Human
uuauacuugcuuacuccagccaucugcaguac

SEQ ID NO: 533746 - RNA, 32 nt, Human
uuauacuuucugcacauucaguguauugguaa

SEQ ID NO: 533747 - RNA, 32 nt, Human
uuauacuuuggccauaccacagagcuagauug

SEQ ID NO: 533748 - RNA, 32 nt, Human
uuauagaaaaaugcugcuaaccucugguuugc

SEQ ID NO: 533749 - RNA, 32 nt, Human
uuauagaaagcaauccagaugugguuuacucu

SEQ ID NO: 533750 - RNA, 32 nt, Human
uuauagaagggaucaugaaaaggucuggucag

SEQ ID NO: 533751 - RNA, 32 nt, Human
uuauagacugaaauaaaaugaaacuucaaaua

SEQ ID NO: 533752 - RNA, 32 nt, Human
uuauagagaaaagugugaauucagguggagag

SEQ ID NO: 533753 - RNA, 32 nt, Human
uuauagagacaggguuucaccguguuggccag

SEQ ID NO: 533754 - RNA, 32 nt, Human
uuauagagacaggguuucgccauguugcacag

SEQ ID NO: 533755 - RNA, 32 nt, Human
uuauagagacgggguuucaccacguuggccag

SEQ ID NO: 533756 - RNA, 32 nt, Human
uuauagagacgggguuucgccauguuggccag

SEQ ID NO: 533757 - RNA, 32 nt, Human
uuauagagagacucugggccacccucaaacac

SEQ ID NO: 533758 - RNA, 32 nt, Human
uuauagagagaggagaggaggggaagagccuc

SEQ ID NO: 533759 - RNA, 32 nt, Human
uuauagagauaggguuucaccguguuggccag

SEQ ID NO: 533760 - RNA, 32 nt, Human
uuauagagauggggguuuugccauguugccca

SEQ ID NO: 533761 - RNA, 32 nt, Human
uuauagagccuaggcuggaggagguacauggg

SEQ ID NO: 533762 - RNA, 32 nt, Human
uuauagaggcagagucucaccauguugccuag

SEQ ID NO: 533763 - RNA, 32 nt, Human
uuauagaggugggguuuuacuaugcuguccag

SEQ ID NO: 533764 - RNA, 32 nt, Human
uuauagagugaaccaagaugucaguuuuguau

SEQ ID NO: 533765 - RNA, 32 nt, Human
uuauagaucuaauguggaauugcugaacucag

SEQ ID NO: 533766 - RNA, 32 nt, Human
uuauagaugucaggaaacauucagugaaaaac

SEQ ID NO: 533767 - RNA, 32 nt, Human
uuauagcaauuuaagggccaccagaagcaggc

SEQ ID NO: 533768 - RNA, 32 nt, Human
uuauagcacaggcccagguggaucaucucaug

SEQ ID NO: 533769 - RNA, 32 nt, Human
uuauagcacaguuacaguaguucaauggagaa

SEQ ID NO: 533770 - RNA, 32 nt, Human
uuauagcacauacuauuucgcuuuguacuaua

SEQ ID NO: 533771 - RNA, 32 nt, Human
uuauagcagcuaagggcaccugccaggcugga

SEQ ID NO: 533772 - RNA, 32 nt, Human
uuauagcaguacuauaaacccaggaaguuugc

SEQ ID NO: 533773 - RNA, 32 nt, Human
uuauagccaagaagggaaggagacacggggau

SEQ ID NO: 533774 - RNA, 32 nt, Human
uuauagccacguuggcaccucuugaaccucug

SEQ ID NO: 533775 - RNA, 32 nt, Human
uuauagccaggagcaggaggaggacaucacag

SEQ ID NO: 533776 - RNA, 32 nt, Human
uuauagccaguuguaauauacaugcauuccua

SEQ ID NO: 533777 - RNA, 32 nt, Human
uuauagccucaaacucccaggcucaagcaauc

SEQ ID NO: 533778 - RNA, 32 nt, Human
uuauagcucacugcaaaucuaacuucaucaug

SEQ ID NO: 533779 - RNA, 32 nt, Human
uuauagcucacugcagccuggaacuccuggga

SEQ ID NO: 533780 - RNA, 32 nt, Human
uuauagcugugacuucugcccugccaggccgc

SEQ ID NO: 533781 - RNA, 32 nt, Human
uuauagcuuugucaaguaaauuuggacgcagc

SEQ ID NO: 533782 - RNA, 32 nt, Human
uuauaggacaccaagcagauuuaacccaaaga

SEQ ID NO: 533783 - RNA, 32 nt, Human
uuauaggacacggaacucccuggguaggaguu

SEQ ID NO: 533784 - RNA, 24 nt, Human
uuauaggcacaagucaccaugccc

SEQ ID NO: 533785 - RNA, 32 nt, Human
uuauaggcacacaccaccacauccagcuuauu

SEQ ID NO: 533786 - RNA, 32 nt, Human
uuauaggcacacaccaccauacccagcuaauu

SEQ ID NO: 533787 - RNA, 31 nt, Human
uuauaggcacgagccaccaugccaagccugu

SEQ ID NO: 533788 - RNA, 32 nt, Human
uuauaggcaugugccacggugccugacuugag

SEQ ID NO: 533789 - RNA, 32 nt, Human
uuauaggcauguuguuuugaauguggacuuug

SEQ ID NO: 533790 - RNA, 32 nt, Human
uuauaggcgagugccaucaugcccggcuaauu

SEQ ID NO: 533791 - RNA, 32 nt, Human
uuauaggcgugugccauggugccuggcccuua

SEQ ID NO: 533792 - RNA, 32 nt, Human
uuauaggcuauucaguaucaagauagauuucu

SEQ ID NO: 533793 - RNA, 32 nt, Human
uuauaggcuggguguggugagccaccccagcc

SEQ ID NO: 533794 - RNA, 32 nt, Human
uuauagggcaagaccuuugugcuuuugaucau

SEQ ID NO: 533795 - RNA, 32 nt, Human
uuauaggugccacagggcacagcuccaucauu

SEQ ID NO: 533796 - RNA, 32 nt, Human
uuauagucacauagauaauggugccacguguu

SEQ ID NO: 533797 - RNA, 32 nt, Human
uuauagucacauuuacaaccaucuugagauuu

SEQ ID NO: 533798 - RNA, 32 nt, Human
uuauagugauuauucagaagcauuuuaauuua

SEQ ID NO: 533799 - RNA, 32 nt, Human
uuauaguggaagggccuucaauuguaucagua

SEQ ID NO: 533800 - RNA, 32 nt, Human
uuauaguggcugaaaacuggggagauacuuga

SEQ ID NO: 533801 - RNA, 32 nt, Human
uuauagugucugccaugccauguggaaauacu

SEQ ID NO: 533802 - RNA, 32 nt, Human
uuauagugucuuucacguguuugaggccaucu

SEQ ID NO: 533803 - RNA, 32 nt, Human
uuauagugugagccaccgcgucuggcugaaaa

SEQ ID NO: 533804 - RNA, 32 nt, Human
uuauaguuagcccaaagacucugggugugagg

SEQ ID NO: 533805 - RNA, 32 nt, Human
uuauaguuauucuucugaacuaagacauguca

SEQ ID NO: 533806 - RNA, 32 nt, Human
uuauaguucauucauuucucuucaccauguau

SEQ ID NO: 533807 - RNA, 32 nt, Human
uuauaguuuccagaaacguugugcucauuuac

SEQ ID NO: 533808 - RNA, 32 nt, Human
uuauauaaaugcccaaauuugagaugcauuau

SEQ ID NO: 533809 - RNA, 32 nt, Human
uuauauaagaugaaauuaaccauuuuaaagua

SEQ ID NO: 533810 - RNA, 32 nt, Human
uuauauaagcuguaguccacuuuuccaucgua

SEQ ID NO: 533811 - RNA, 32 nt, Human
uuauauaauauauggaggcuguuucucagugu

SEQ ID NO: 533812 - RNA, 32 nt, Human
uuauauaaucuacagauaauuucuacugaaga

SEQ ID NO: 533813 - RNA, 32 nt, Human
uuauauacaagaaaaaccuuuccacugaaaaa

SEQ ID NO: 533814 - RNA, 32 nt, Human
uuauauacacuguuuccuggccccagagcuca

SEQ ID NO: 533815 - RNA, 32 nt, Human
uuauauacagguugaguaucccuucuccaaaa

SEQ ID NO: 533816 - RNA, 32 nt, Human
uuauauacuauggaccuaucagcuccacuuca

SEQ ID NO: 533817 - RNA, 32 nt, Human
uuauauacuguaaggccuucuuuaggccuuua

SEQ ID NO: 533818 - RNA, 32 nt, Human
uuauauaggauggaacaggaagguauguccug

SEQ ID NO: 533819 - RNA, 32 nt, Human
uuauauaguccagcuaauugacauggcccagc

SEQ ID NO: 533820 - RNA, 32 nt, Human
uuauauagugugguugaacaggaugcaaucuu

SEQ ID NO: 533821 - RNA, 32 nt, Human
uuauaucaaaaacuuuccugaccaagaacaaa

SEQ ID NO: 533822 - RNA, 32 nt, Human
uuauaucaauugaggggaaagugcaguacugu

SEQ ID NO: 533823 - RNA, 32 nt, Human
uuauaucacucccagguuuuugacuugggcaa

SEQ ID NO: 533824 - RNA, 32 nt, Human
uuauaucacucuuucuuucaugacauugguua

SEQ ID NO: 533825 - RNA, 32 nt, Human
uuauaucacuggagaacucuuaaaccgacacc

SEQ ID NO: 533826 - RNA, 32 nt, Human
uuauaucagugucuccuccacccucagccucc

SEQ ID NO: 533827 - RNA, 32 nt, Human
uuauaucauccagaaaagaaaaacacgagaaa

SEQ ID NO: 533828 - RNA, 32 nt, Human
uuauaucauuccaccagcaccaccaagaccug

SEQ ID NO: 533829 - RNA, 32 nt, Human
uuauauccaugucuucugaauguggauuccag

SEQ ID NO: 533830 - RNA, 32 nt, Human
uuauauccauugccacagcaauacuguguaac

SEQ ID NO: 533831 - RNA, 32 nt, Human
uuauaucccacugcccugcugugugacaguuu

SEQ ID NO: 533832 - RNA, 32 nt, Human
uuauaucccucaccucuggccucucaucccuu

SEQ ID NO: 533833 - RNA, 32 nt, Human
uuauauccuauaauacaaagcauauuaaaugg

SEQ ID NO: 533834 - RNA, 32 nt, Human
uuauauccuguguugugaccucaugguuuaag

SEQ ID NO: 533835 - RNA, 32 nt, Human
uuauaucugcacauucauaccucuccaaagac

SEQ ID NO: 533836 - RNA, 32 nt, Human
uuauaucugggagaaugcagagcucuaaucgg

SEQ ID NO: 533837 - RNA, 32 nt, Human
uuauaucugucagaugccuagaacagcaccug

SEQ ID NO: 533838 - RNA, 32 nt, Human
uuauaucuugacuugccuuguacaucuuucaa

SEQ ID NO: 533839 - RNA, 32 nt, Human
uuauaucuuggauauuguauuacccuggguau

SEQ ID NO: 533840 - RNA, 32 nt, Human
uuauaucuuuaaguacugcuacuugaauaacu

SEQ ID NO: 533841 - RNA, 32 nt, Human
uuauaucuuucccacauguauguauauucuaa

SEQ ID NO: 533842 - RNA, 32 nt, Human
uuauaucuuugggaacaucucucacccccugg

SEQ ID NO: 533843 - RNA, 32 nt, Human
uuauaugaaacuagauauuuauugcgcucagg

SEQ ID NO: 533844 - RNA, 32 nt, Human
uuauaugaaccaagggaggagucaggaagaga

SEQ ID NO: 533845 - RNA, 32 nt, Human
uuauaugaauuuauuuuacuauuugaaaaugu

SEQ ID NO: 533846 - RNA, 32 nt, Human
uuauaugaggggcaguggacaguucccuaugc

SEQ ID NO: 533847 - RNA, 32 nt, Human
uuauaugauucauauauuuuaugaaucagaau

SEQ ID NO: 533848 - RNA, 32 nt, Human
uuauaugauuccugccauuugcugcuaaaucu

SEQ ID NO: 533849 - RNA, 32 nt, Human
uuauaugcagagccuuggaaagaugggcaaau

SEQ ID NO: 533850 - RNA, 32 nt, Human
uuauaugccaggaagcaggaucgaagaccaaa

SEQ ID NO: 533851 - RNA, 32 nt, Human
uuauaugcccugaauaagucugaaaagguccu

SEQ ID NO: 533852 - RNA, 32 nt, Human
uuauaugcccugcuugggaaauugcagagacc

SEQ ID NO: 533853 - RNA, 32 nt, Human
uuauaugcucugucugugcuuucuagguuacc

SEQ ID NO: 533854 - RNA, 32 nt, Human
uuauaugcugggguaaagcacaaguacagagg

SEQ ID NO: 533855 - RNA, 32 nt, Human
uuauauggaaaaucacugaugucauaucauuu

SEQ ID NO: 533856 - RNA, 32 nt, Human
uuauauggaaccaacgaagugggagcuaaaac

SEQ ID NO: 533857 - RNA, 32 nt, Human
uuauauggauauauguauguguuugcauugac

SEQ ID NO: 533858 - RNA, 23 nt, Human
uuauauggcaaaauaauaaauac

SEQ ID NO: 533859 - RNA, 29 nt, Human
uuauaugggcauggcacuggagcuguacu

SEQ ID NO: 533860 - RNA, 32 nt, Human
uuauaugguuccaggacccagccuucaaaauu

SEQ ID NO: 533861 - RNA, 32 nt, Human
uuauaugucuccauucuuuuuaaaaucuuaac

SEQ ID NO: 533862 - RNA, 23 nt, Human
uuauauguguauaccauaugugg

SEQ ID NO: 533863 - RNA, 20 nt, Human
uuauauguguucacacaugu

SEQ ID NO: 533864 - RNA, 32 nt, Human
uuauauguucaacauggagccaucccagccau

SEQ ID NO: 533865 - RNA, 32 nt, Human
uuauauguuguggaugcaagauuguuuucaga

SEQ ID NO: 533866 - RNA, 32 nt, Human
uuauauuaaaucugggauuaugacgguaucac

SEQ ID NO: 533867 - RNA, 32 nt, Human
uuauauuacaauaugccaauauauuccaauau

SEQ ID NO: 533868 - RNA, 32 nt, Human
uuauauuacagauuuucucuucuuuuaggauu

SEQ ID NO: 533869 - RNA, 32 nt, Human
uuauauuagugccucaggaaugugucacuacu

SEQ ID NO: 533870 - RNA, 32 nt, Human
uuauauuaugaccacacacaucucugcuggaa

SEQ ID NO: 533871 - RNA, 32 nt, Human
uuauauuauuacuaauugucuacuucuggagu

SEQ ID NO: 533872 - RNA, 32 nt, Human
uuauauucacccaacaaaagugucucugugga

SEQ ID NO: 533873 - RNA, 32 nt, Human
uuauauucagcccugaguggagaccuaucaga

SEQ ID NO: 533874 - RNA, 32 nt, Human
uuauauucauuucuucuguucuccuucuguua

SEQ ID NO: 533875 - RNA, 32 nt, Human
uuauauucccuuauuuauugauauuuagucca

SEQ ID NO: 533876 - RNA, 32 nt, Human
uuauauuccguauucuuacaagaagguaagcu

SEQ ID NO: 533877 - RNA, 22 nt, Human
uuauauuccugcaguagacagu

SEQ ID NO: 533878 - RNA, 17 nt, Human
uuauauucuuucagaca

SEQ ID NO: 533879 - RNA, 32 nt, Human
uuauauugaaaaucacugcuuccauagauugg

SEQ ID NO: 533880 - RNA, 32 nt, Human
uuauauugaagcucaggcaagugccuugcaca

SEQ ID NO: 533881 - RNA, 32 nt, Human
uuauauugccuaggcuggaaugcagugguuau

SEQ ID NO: 533882 - RNA, 32 nt, Human
uuauauugcuucugugcuaugguaccagcaga

SEQ ID NO: 533883 - RNA, 31 nt, Human
uuauauuggacaauauagucaaaaccaucuu

SEQ ID NO: 533884 - RNA, 32 nt, Human
uuauauuggccaaaguuuucuuuuccuccacc

SEQ ID NO: 533885 - RNA, 32 nt, Human
uuauauugugaacugccuucucuucaucccaa

SEQ ID NO: 533886 - RNA, 32 nt, Human
uuauauuuacauuuuaauuaaacaguaucaaa

SEQ ID NO: 533887 - RNA, 32 nt, Human
uuauauuuaucuguaccuucuuugcuacuuaa

SEQ ID NO: 533888 - RNA, 32 nt, Human
uuauauuuauguuaauuaugcauaugugugau

SEQ ID NO: 533889 - RNA, 32 nt, Human
uuauauuugcagccacugucagaugggcauca

SEQ ID NO: 533890 - RNA, 32 nt, Human
uuauauuuugacaauaggaaacagugaccauu

SEQ ID NO: 533891 - RNA, 32 nt, Human
uuauauuuugugccucauuuuuggaaagccug

SEQ ID NO: 533892 - RNA, 32 nt, Human
uuauauuuuucagcccuucauccagcaaauca

SEQ ID NO: 533893 - RNA, 32 nt, Human
uuauauuuuugucaugguaaagagguauacuu

SEQ ID NO: 533894 - RNA, 32 nt, Human
uuaucaaaaaggcaggaaaguagguaugaucu

SEQ ID NO: 533895 - RNA, 32 nt, Human
uuaucaaaaauggauuaucuuuagaaaccucu

SEQ ID NO: 533896 - RNA, 32 nt, Human
uuaucaaaacaacaguaauaacaaaacccaga

SEQ ID NO: 533897 - RNA, 32 nt, Human
uuaucaaauacuuuaauagaaccaaaguugca

SEQ ID NO: 533898 - RNA, 32 nt, Human
uuaucaaauguuccuucagcccugcaguugcc

SEQ ID NO: 533899 - RNA, 32 nt, Human
uuaucaaccacagaagucugauauuguaguau

SEQ ID NO: 533900 - RNA, 21 nt, Human
uuaucaacuauugcuagugaa

SEQ ID NO: 533901 - RNA, 32 nt, Human
uuaucaagauugaagucaguacaguauugaca

SEQ ID NO: 533902 - RNA, 32 nt, Human
uuaucaagcuggucaagguagaaauacugaua

SEQ ID NO: 533903 - RNA, 32 nt, Human
uuaucaaggucagagaagaggaaaagagacuc

SEQ ID NO: 533904 - RNA, 32 nt, Human
uuaucaaugucuguuuaauugugugacuaucu

SEQ ID NO: 533905 - RNA, 26 nt, Human
uuaucacaaaaauaaacucauaugaa

SEQ ID NO: 533906 - RNA, 32 nt, Human
uuaucacaacugcacauuucucuaaggucacc

SEQ ID NO: 533907 - RNA, 32 nt, Human
uuaucacaccacugcacuccagccugggugac

SEQ ID NO: 533908 - RNA, 32 nt, Human
uuaucacaccacugcacuucagccuggaugac

SEQ ID NO: 533909 - RNA, 32 nt, Human
uuaucacacugcaucuguuggaauucugcaca

SEQ ID NO: 533910 - RNA, 32 nt, Human
uuaucacagcagaaucaggaucucuuucucau

SEQ ID NO: 533911 - RNA, 32 nt, Human
uuaucaccaaaaagugcuucaucaggcgugcu

SEQ ID NO: 533912 - RNA, 32 nt, Human
uuaucaccaacuuuucuuuaaaaguguuccuu

SEQ ID NO: 533913 - RNA, 32 nt, Human
uuaucaccaagaagcggggcgaucacuuuguc

SEQ ID NO: 533914 - RNA, 32 nt, Human
uuaucaccaugacugcugucagccuggaucga

SEQ ID NO: 533915 - RNA, 32 nt, Human
uuaucaccauuuugguagaugagguugucugg

SEQ ID NO: 533916 - RNA, 32 nt, Human
uuaucacccaggccugauucacuggccuggcg

SEQ ID NO: 533917 - RNA, 32 nt, Human
uuaucaccuuccaaacaaaagcacuuacuuuu

SEQ ID NO: 533918 - RNA, 32 nt, Human
uuaucacgccgcugcacuccagcuugaaugac

SEQ ID NO: 533919 - RNA, 32 nt, Human
uuaucacgcgauggcauccacuguggaaggag

SEQ ID NO: 533920 - RNA, 32 nt, Human
uuaucacuaaaauguuaucuucaagagauguu

SEQ ID NO: 533921 - RNA, 32 nt, Human
uuaucacuacagccaguaaccucuccugugcc

SEQ ID NO: 533922 - RNA, 32 nt, Human
uuaucacuccacccugccucuacuccuccgcc

SEQ ID NO: 533923 - RNA, 32 nt, Human
uuaucacugggcagacgaggaggugguacagc

SEQ ID NO: 533924 - RNA, 32 nt, Human
uuaucacuuuucugcugaaauguacauguuug

SEQ ID NO: 533925 - RNA, 32 nt, Human
uuaucagaaauccugcauaaaaagucagccau

SEQ ID NO: 533926 - RNA, 32 nt, Human
uuaucagaaggaaaaagagcagaauuuucuuc

SEQ ID NO: 533927 - RNA, 32 nt, Human
uuaucagacaccaauaaauucuuuuuguuggg

SEQ ID NO: 533928 - RNA, 32 nt, Human
uuaucagagccaagacaccugcugcagcucuc

SEQ ID NO: 533929 - RNA, 32 nt, Human
uuaucagagccuuagacccagcacuccuugga

SEQ ID NO: 533930 - RNA, 32 nt, Human
uuaucagaguccauauggaguuacugcugugg

SEQ ID NO: 533931 - RNA, 32 nt, Human
uuaucagcaaacacauugucuaaucuuucaaa

SEQ ID NO: 533932 - RNA, 32 nt, Human
uuaucagcaccugaggcaggagaagagaugag

SEQ ID NO: 533933 - RNA, 32 nt, Human
uuaucagcccucucuuuucuuauauuaaacag

SEQ ID NO: 533934 - RNA, 32 nt, Human
uuaucagcgaugccccucugucacucaugccu

SEQ ID NO: 533935 - RNA, 32 nt, Human
uuaucagcuucugcaaggagcuuugucccacc

SEQ ID NO: 533936 - RNA, 32 nt, Human
uuaucaggagugaacccagaggcacguaugaa

SEQ ID NO: 533937 - RNA, 32 nt, Human
uuaucaggcuguguguuaauucugggccaguc

SEQ ID NO: 533938 - RNA, 32 nt, Human
uuaucagggcugggauacuucugauucuggcu

SEQ ID NO: 533939 - RNA, 32 nt, Human
uuaucagggugcuuuggguuuugauuuuguug

SEQ ID NO: 533940 - RNA, 32 nt, Human
uuaucaguauuccaagccugggaugaugcuag

SEQ ID NO: 533941 - RNA, 32 nt, Human
uuaucagucugacaaucucugccuuuugauug

SEQ ID NO: 533942 - RNA, 32 nt, Human
uuaucaguguaagcccugcuuagcucaucuua

SEQ ID NO: 533943 - RNA, 32 nt, Human
uuaucauaaagaaaaagagguuguugcuguag

SEQ ID NO: 533944 - RNA, 22 nt, Human
uuaucauaaauuauuucaugaa

SEQ ID NO: 533945 - RNA, 26 nt, Human
uuaucauaauagcacuguuacaugaa

SEQ ID NO: 533946 - RNA, 32 nt, Human
uuaucauauucauucacacauauuauauguga

SEQ ID NO: 533947 - RNA, 32 nt, Human
uuaucauauugguuuuucauuacuucugaaua

SEQ ID NO: 533948 - RNA, 32 nt, Human
uuaucaucacacaacucagccuggcugauuau

SEQ ID NO: 533949 - RNA, 21 nt, Human
uuaucaucaucaucgucauca

SEQ ID NO: 533950 - RNA, 32 nt, Human
uuaucauccucccuggaaauuuccucaucauu

SEQ ID NO: 533951 - RNA, 32 nt, Human
uuaucaucugagugauauguuucuugaccugu

SEQ ID NO: 533952 - RNA, 32 nt, Human
uuaucaucuguagcuucauccuauccggaggc

SEQ ID NO: 533953 - RNA, 32 nt, Human
uuaucaugaaguuugccuguucuagaauugua

SEQ ID NO: 533954 - RNA, 32 nt, Human
uuaucaugcauguuaugcuuuacugcgaauaa

SEQ ID NO: 533955 - RNA, 31 nt, Human
uuaucauggacaauuugggcuagaggcagga

SEQ ID NO: 533956 - RNA, 32 nt, Human
uuaucauggaggggguacaggaagagacugac

SEQ ID NO: 533957 - RNA, 32 nt, Human
uuaucaugggaaagccuuugcccagaaauaaa

SEQ ID NO: 533958 - RNA, 32 nt, Human
uuaucauucaguuuguucugugcaccugaggc

SEQ ID NO: 533959 - RNA, 32 nt, Human
uuaucauuuggacacaugcacacauacagucu

SEQ ID NO: 533960 - RNA, 32 nt, Human
uuauccaaaagacuugaaacugggguccugag

SEQ ID NO: 533961 - RNA, 32 nt, Human
uuauccaaagccccaaaucccuagagugcuuu

SEQ ID NO: 533962 - RNA, 32 nt, Human
uuauccaacauacaaacuuucccaugcagcuu

SEQ ID NO: 533963 - RNA, 32 nt, Human
uuauccaacauuuuucuuuuucuguguauuac

SEQ ID NO: 533964 - RNA, 32 nt, Human
uuauccaaggagguggcugugcagguggccac

SEQ ID NO: 533965 - RNA, 32 nt, Human
uuauccacaaaugacagcuccuuacuugagca

SEQ ID NO: 533966 - RNA, 32 nt, Human
uuauccacaaauucugucggcuucaucguuaa

SEQ ID NO: 533967 - RNA, 32 nt, Human
uuauccacacacuaaucaucucagugucuuua

SEQ ID NO: 533968 - RNA, 32 nt, Human
uuauccacauccaaaaauuaggaaaagcagga

SEQ ID NO: 533969 - RNA, 32 nt, Human
uuauccaccacagugacaaaggaaaaguggug

SEQ ID NO: 533970 - RNA, 32 nt, Human
uuauccacccaggagcuagggaagagacccua

SEQ ID NO: 533971 - RNA, 32 nt, Human
uuauccacuuaucaguugauggacacuuaggu

SEQ ID NO: 533972 - RNA, 32 nt, Human
uuauccagaaccuucccacggaaggaagcucu

SEQ ID NO: 533973 - RNA, 32 nt, Human
uuauccagagucagaugaggcugcaguccagg

SEQ ID NO: 533974 - RNA, 32 nt, Human
uuauccagaugugacagagcucgacccaagcc

SEQ ID NO: 533975 - RNA, 32 nt, Human
uuauccagccaagaagaugaaaacuacagaga

SEQ ID NO: 533976 - RNA, 32 nt, Human
uuauccagccuaucguugauggauauuugguu

SEQ ID NO: 533977 - RNA, 32 nt, Human
uuauccaggcuggagugcagaggcacagucag

SEQ ID NO: 533978 - RNA, 32 nt, Human
uuauccaggcuggggugcaauggugcgauauc

SEQ ID NO: 533979 - RNA, 32 nt, Human
uuauccaguagagagaaagugacagugaaagu

SEQ ID NO: 533980 - RNA, 32 nt, Human
uuauccauuugcaaauguuuuaaauugcaaag

SEQ ID NO: 533981 - RNA, 32 nt, Human
uuaucccaacaucuagcugcucaggcccuaau

SEQ ID NO: 533982 - RNA, 32 nt, Human
uuaucccaagacuagugugcuuucugcuacac

SEQ ID NO: 533983 - RNA, 32 nt, Human
uuaucccaauuuuaaagauaaggaaaucaaac

SEQ ID NO: 533984 - RNA, 32 nt, Human
uuaucccacugcacucugcuuaaggguuccug

SEQ ID NO: 533985 - RNA, 32 nt, Human
uuaucccagaacuuagauuuuaucgacauuau

SEQ ID NO: 533986 - RNA, 32 nt, Human
uuaucccagcacuuggggaggcugaggcgggc

SEQ ID NO: 533987 - RNA, 32 nt, Human
uuaucccagcacuuugggaggccgaggcaggc

SEQ ID NO: 533988 - RNA, 32 nt, Human
uuaucccagcacuuugggaggccgaggugggc

SEQ ID NO: 533989 - RNA, 32 nt, Human
uuaucccagcacuuugggaggcugaggcgggc

SEQ ID NO: 533990 - RNA, 32 nt, Human
uuaucccagugcuuuaggaggcugaggcaaga

SEQ ID NO: 533991 - RNA, 32 nt, Human
uuauccccacacuugacugggcuguggaggug

SEQ ID NO: 533992 - RNA, 32 nt, Human
uuauccccaccuuggcuaucaucacccgauga

SEQ ID NO: 533993 - RNA, 32 nt, Human
uuauccccagaagaaauacaaaugcagaucaa

SEQ ID NO: 533994 - RNA, 32 nt, Human
uuauccccuuuggaugauggcagaaacuucau

SEQ ID NO: 533995 - RNA, 32 nt, Human
uuaucccgagaggcagcucugcauccuguggu

SEQ ID NO: 533996 - RNA, 32 nt, Human
uuaucccgcucuuggaguuucuagucacucac

SEQ ID NO: 533997 - RNA, 32 nt, Human
uuaucccgggaauucaagguugcagugagcua

SEQ ID NO: 533998 - RNA, 32 nt, Human
uuaucccuaagucacauuggaagugaacuugg

SEQ ID NO: 533999 - RNA, 32 nt, Human
uuaucccucaaauuuuaagugauaugaaauac

SEQ ID NO: 534000 - RNA, 32 nt, Human
uuaucccuguaauuccagggcuuuugggaguu

SEQ ID NO: 534001 - RNA, 32 nt, Human
uuauccgagaugaccagcucugagccaacuuc

SEQ ID NO: 534002 - RNA, 32 nt, Human
uuauccgcgaugcguuuccuggcagcuacauu

SEQ ID NO: 534003 - RNA, 32 nt, Human
uuauccguaagaggcaaggaggaaaccuucuu

SEQ ID NO: 534004 - RNA, 32 nt, Human
uuauccuagacccugaggauauagcuuuuuaa

SEQ ID NO: 534005 - RNA, 32 nt, Human
uuauccuagcuacucaggaggcugaggcagga

SEQ ID NO: 534006 - RNA, 32 nt, Human
uuauccucaagccaauuuccagaaccugccac

SEQ ID NO: 534007 - RNA, 32 nt, Human
uuauccucaagcuccagggcagccuggccgag

SEQ ID NO: 534008 - RNA, 18 nt, Human
uuauccucagucagccag

SEQ ID NO: 534009 - RNA, 32 nt, Human
uuauccucccaaguagcugggauuacagaugc

SEQ ID NO: 534010 - RNA, 32 nt, Human
uuauccucccacccuaccccagaagaggagcu

SEQ ID NO: 534011 - RNA, 32 nt, Human
uuauccucccuucacacgcccccuucccaccg

SEQ ID NO: 534012 - RNA, 32 nt, Human
uuauccuccugacucuucaggccagguagcag

SEQ ID NO: 534013 - RNA, 32 nt, Human
uuauccucuccucugaauuuuguucuucagag

SEQ ID NO: 534014 - RNA, 32 nt, Human
uuauccucuucccagccucaucccuguuuuuc

SEQ ID NO: 534015 - RNA, 32 nt, Human
uuauccucuuccuccucuuccuccuccuggug

SEQ ID NO: 534016 - RNA, 32 nt, Human
uuauccugaagucaucaaugauuucccuuuga

SEQ ID NO: 534017 - RNA, 32 nt, Human
uuauccugaauuccccuugccaccccacccuc

SEQ ID NO: 534018 - RNA, 32 nt, Human
uuauccugaguacugggauuacaggcgcccac

SEQ ID NO: 534019 - RNA, 32 nt, Human
uuauccugcuuugguuuuagagugauugugag

SEQ ID NO: 534020 - RNA, 32 nt, Human
uuauccuggaguuuacaaauccaaauauugac

SEQ ID NO: 534021 - RNA, 32 nt, Human
uuauccugggagauggggaggaagccccaucu

SEQ ID NO: 534022 - RNA, 32 nt, Human
uuauccugggcugugcggggccgaggcugcuu

SEQ ID NO: 534023 - RNA, 32 nt, Human
uuauccuggugccugauugggguggggacugu

SEQ ID NO: 534024 - RNA, 32 nt, Human
uuauccuucauaauccucagcuuuccccuucc

SEQ ID NO: 534025 - RNA, 32 nt, Human
uuauccuugcuucucuguggccugugccaugg

SEQ ID NO: 534026 - RNA, 32 nt, Human
uuauccuuucugcuuuccuccuggaagcauua

SEQ ID NO: 534027 - RNA, 32 nt, Human
uuaucgcauagaguucagagacuggaaacuga

SEQ ID NO: 534028 - RNA, 24 nt, Human
uuaucgcccaggcuggaguacagu

SEQ ID NO: 534029 - RNA, 32 nt, Human
uuaucgcccaggcuggaguacagugaugcaau

SEQ ID NO: 534030 - RNA, 32 nt, Human
uuaucgcccaggcuggggugcaauggcgcaac

SEQ ID NO: 534031 - RNA, 32 nt, Human
uuaucggaggcugcgggacuguucuguugugg

SEQ ID NO: 534032 - RNA, 32 nt, Human
uuaucggugcccauuauauccuuaaguuugga

SEQ ID NO: 534033 - RNA, 32 nt, Human
uuaucgucauaaaaacaguuggugacagcaac

SEQ ID NO: 534034 - RNA, 32 nt, Human
uuaucguugcuacugauuagguccauggaggg

SEQ ID NO: 534035 - RNA, 23 nt, Human
uuaucuaaagcauugucagugaa

SEQ ID NO: 534036 - RNA, 32 nt, Human
uuaucuaacccucuuuuccuacaaaggagaaa

SEQ ID NO: 534037 - RNA, 32 nt, Human
uuaucuacccauuaacacuuguuagagacacc

SEQ ID NO: 534038 - RNA, 32 nt, Human
uuaucuacccuuuggcacuuaucuugcuuauc

SEQ ID NO: 534039 - RNA, 32 nt, Human
uuaucuacuagauuauuuccucuaauaaaauc

SEQ ID NO: 534040 - RNA, 32 nt, Human
uuaucuauaucaucuuacugccugugugugug

SEQ ID NO: 534041 - RNA, 32 nt, Human
uuaucuaugcuauuuaggacuacuuucuggag

SEQ ID NO: 534042 - RNA, 32 nt, Human
uuaucucacacccugaggaauaaagauuggaa

SEQ ID NO: 534043 - RNA, 32 nt, Human
uuaucucagaagacuauuucuaggauuaacug

SEQ ID NO: 534044 - RNA, 32 nt, Human
uuaucuccaagcucagggcaaucccuucccuc

SEQ ID NO: 534045 - RNA, 32 nt, Human
uuaucuccaucuuuaugucucuguguacccau

SEQ ID NO: 534046 - RNA, 32 nt, Human
uuaucuccccuucacaugauuccuucugugcc

SEQ ID NO: 534047 - RNA, 32 nt, Human
uuaucucccuuccccuuccuaagucccauuuc

SEQ ID NO: 534048 - RNA, 32 nt, Human
uuaucucccuugcuccccuuuaaacaccugcg

SEQ ID NO: 534049 - RNA, 32 nt, Human
uuaucucccuuuccacucucuuuccaauuuca

SEQ ID NO: 534050 - RNA, 32 nt, Human
uuaucuccuaguuucuucaaugcuuacgccuu

SEQ ID NO: 534051 - RNA, 32 nt, Human
uuaucuccucccagccuugagggagggaacaa

SEQ ID NO: 534052 - RNA, 32 nt, Human
uuaucucgaccagccaagcucuggagagcaau

SEQ ID NO: 534053 - RNA, 32 nt, Human
uuaucucucgaguuuugaagcugaacaguagc

SEQ ID NO: 534054 - RNA, 32 nt, Human
uuaucucugccuccuuccuccuccuucccagu

SEQ ID NO: 534055 - RNA, 32 nt, Human
uuaucucugugucccucuaccuaauucucuua

SEQ ID NO: 534056 - RNA, 32 nt, Human
uuaucucuuuucagaggggaaaaaggagcagc

SEQ ID NO: 534057 - RNA, 32 nt, Human
uuaucugaaacucuugcacuuccccaaccagg

SEQ ID NO: 534058 - RNA, 32 nt, Human
uuaucugagaggauggaaguggugagggcauc

SEQ ID NO: 534059 - RNA, 32 nt, Human
uuaucugauuuaauacauauuauugaauauca

SEQ ID NO: 534060 - RNA, 32 nt, Human
uuaucugcaggaguucaagaccagccugggga

SEQ ID NO: 534061 - RNA, 32 nt, Human
uuaucugccugaggaagaugcauucugggcac

SEQ ID NO: 534062 - RNA, 32 nt, Human
uuaucugcgacucuccagcccagcgagaggcg

SEQ ID NO: 534063 - RNA, 32 nt, Human
uuaucugcucucacacugcucauaaagacaua

SEQ ID NO: 534064 - RNA, 32 nt, Human
uuaucugcuuugacaaagccuuucugaaacgc

SEQ ID NO: 534065 - RNA, 32 nt, Human
uuaucuggaaguaaccauuugcacuggaguuc

SEQ ID NO: 534066 - RNA, 32 nt, Human
uuaucuggcaaaauuuugcuuuccagaaauac

SEQ ID NO: 534067 - RNA, 32 nt, Human
uuaucuggccaucagccagggacagagcugca

SEQ ID NO: 534068 - RNA, 32 nt, Human
uuaucuggcuuaucgucucucccucagcaaag

SEQ ID NO: 534069 - RNA, 32 nt, Human
uuaucuggcuuaucgucucucccucagcgaag

SEQ ID NO: 534070 - RNA, 32 nt, Human
uuaucugggggucuuguccacccuggcuggau

SEQ ID NO: 534071 - RNA, 32 nt, Human
uuaucuggguaucaagcaaaucugaccacauc

SEQ ID NO: 534072 - RNA, 32 nt, Human
uuaucuguaaacacagggaggcagguauggau

SEQ ID NO: 534073 - RNA, 32 nt, Human
uuaucuguaauauuucaguccuuuacaagcca

SEQ ID NO: 534074 - RNA, 32 nt, Human
uuaucugugaagcucaggaaauccaaacauuu

SEQ ID NO: 534075 - RNA, 32 nt, Human
uuaucugugaggaauggacucuccccagacgc

SEQ ID NO: 534076 - RNA, 32 nt, Human
uuaucuguugcaacugaaaacaaaaucuggaa

SEQ ID NO: 534077 - RNA, 32 nt, Human
uuaucuuagaagcacuacaccuugccuugcug

SEQ ID NO: 534078 - RNA, 32 nt, Human
uuaucuuagcacuuugggaggcugaggaugga

SEQ ID NO: 534079 - RNA, 32 nt, Human
uuaucuuauaagaggaaaacaugacaaucauu

SEQ ID NO: 534080 - RNA, 32 nt, Human
uuaucuucaacuugaagcuuuccaauggcgcu

SEQ ID NO: 534081 - RNA, 32 nt, Human
uuaucuuccaccaccuuccuugcuugcagggu

SEQ ID NO: 534082 - RNA, 32 nt, Human
uuaucuucccaagagccccaugaggcgaugac

SEQ ID NO: 534083 - RNA, 32 nt, Human
uuaucuuccccuuggaaagacuaaugagcaca

SEQ ID NO: 534084 - RNA, 32 nt, Human
uuaucuuccggccccguaccacugugccacag

SEQ ID NO: 534085 - RNA, 32 nt, Human
uuaucuuccuuucuaagacauauuuaauguag

SEQ ID NO: 534086 - RNA, 32 nt, Human
uuaucuucuuuaacaaacuuuacucuuauucu

SEQ ID NO: 534087 - RNA, 32 nt, Human
uuaucuugaaggaaccauuagauauggaaaau

SEQ ID NO: 534088 - RNA, 32 nt, Human
uuaucuugcccuuuucauucuaccaacagauc

SEQ ID NO: 534089 - RNA, 32 nt, Human
uuaucuugcuucuucccccaguuucagggauc

SEQ ID NO: 534090 - RNA, 32 nt, Human
uuaucuuuaauaaaauguuauuaugucaacca

SEQ ID NO: 534091 - RNA, 32 nt, Human
uuaucuuuaguguucaguagcagcggggauag

SEQ ID NO: 534092 - RNA, 32 nt, Human
uuaucuuucucccacuccacuuuuccuucaag

SEQ ID NO: 534093 - RNA, 32 nt, Human
uuaucuuucugaccaaaggagcaagagguaua

SEQ ID NO: 534094 - RNA, 32 nt, Human
uuaucuuucuucuguuucuuccuccccgcugu

SEQ ID NO: 534095 - RNA, 32 nt, Human
uuaucuuugacucucuugccuguuaugcuuac

SEQ ID NO: 534096 - RNA, 32 nt, Human
uuaucuuuucucuuggacuuaacaaacauacu

SEQ ID NO: 534097 - RNA, 32 nt, Human
uuaugaaaaaggccucaaggaguacguguuca

SEQ ID NO: 534098 - RNA, 32 nt, Human
uuaugaaaacauuuuauaauuuuaaauggauc

SEQ ID NO: 534099 - RNA, 32 nt, Human
uuaugaaaaggaggaggaacaggaccaagggg

SEQ ID NO: 534100 - RNA, 32 nt, Human
uuaugaaaccaaaaacaaacaaguuugcuuuc

SEQ ID NO: 534101 - RNA, 32 nt, Human
uuaugaaacugucuugaguucuucuugaauug

SEQ ID NO: 534102 - RNA, 32 nt, Human
uuaugaaaguagaagcaagaaucaguugguuu

SEQ ID NO: 534103 - RNA, 32 nt, Human
uuaugaaccagucagcuaucugucuuuugaaa

SEQ ID NO: 534104 - RNA, 32 nt, Human
uuaugaaccucaccuucucugauugugggagu

SEQ ID NO: 534105 - RNA, 32 nt, Human
uuaugaacuguacuggcuguugaccaccagac

SEQ ID NO: 534106 - RNA, 32 nt, Human
uuaugaagaggaccucugacuugcuugagagu

SEQ ID NO: 534107 - RNA, 32 nt, Human
uuaugaaggaagcuaagcacggcugcucacug

SEQ ID NO: 534108 - RNA, 32 nt, Human
uuaugaaggcaucauugauuaagccauuggcc

SEQ ID NO: 534109 - RNA, 32 nt, Human
uuaugaaguaggcuuuucauggggagagauug

SEQ ID NO: 534110 - RNA, 18 nt, Human
uuaugaauaaauaugcag

SEQ ID NO: 534111 - RNA, 32 nt, Human
uuaugaauacaaaucagugggccuucucuaug

SEQ ID NO: 534112 - RNA, 32 nt, Human
uuaugaauggguggaaaggugugagacuggga

SEQ ID NO: 534113 - RNA, 32 nt, Human
uuaugaauguagagaaauucaccagagcucac

SEQ ID NO: 534114 - RNA, 32 nt, Human
uuaugaauugacgacaggugcagagagagaau

SEQ ID NO: 534115 - RNA, 32 nt, Human
uuaugaauugccucugcacaccuagaguccca

SEQ ID NO: 534116 - RNA, 32 nt, Human
uuaugacacuuucucagaucaggauuuucuag

SEQ ID NO: 534117 - RNA, 32 nt, Human
uuaugacaguuuguaugugcucagccaaugag

SEQ ID NO: 534118 - RNA, 32 nt, Human
uuaugaccaauacuuguuauaacuuagaggac

SEQ ID NO: 534119 - RNA, 32 nt, Human
uuaugaccauuuuacagaugggagaacagucu

SEQ ID NO: 534120 - RNA, 32 nt, Human
uuaugacccaaaacuuaccccagauccagaaa

SEQ ID NO: 534121 - RNA, 32 nt, Human
uuaugaccucagagacuccugaggcagcaauu

SEQ ID NO: 534122 - RNA, 32 nt, Human
uuaugaccucaggugauccuccugccuuggcc

SEQ ID NO: 534123 - RNA, 32 nt, Human
uuaugacugcaacuugccuuuuccauuacaga

SEQ ID NO: 534124 - RNA, 28 nt, Human
uuaugacuggaaaauauuugccaaugaa

SEQ ID NO: 534125 - RNA, 32 nt, Human
uuaugagaaauguuaugaaggaaaggacaaca

SEQ ID NO: 534126 - RNA, 32 nt, Human
uuaugagaagcagagggaggaccucaagagac

SEQ ID NO: 534127 - RNA, 32 nt, Human
uuaugagaauauuuuccuuugcccucaugagc

SEQ ID NO: 534128 - RNA, 32 nt, Human
uuaugagaauggaguccucaugaccuaaucgu

SEQ ID NO: 534129 - RNA, 32 nt, Human
uuaugagacagguccucaggccuguguuccaa

SEQ ID NO: 534130 - RNA, 32 nt, Human
uuaugagagaaauguugggcaacuguuuuuac

SEQ ID NO: 534131 - RNA, 32 nt, Human
uuaugagagcccguaguuacaguguccucuaa

SEQ ID NO: 534132 - RNA, 32 nt, Human
uuaugagaggcuaggucauccaaagagaagac

SEQ ID NO: 534133 - RNA, 32 nt, Human
uuaugagauguggcuugggcagcauccccuug

SEQ ID NO: 534134 - RNA, 32 nt, Human
uuaugagcaaauuuaccuuucucuccaaguuc

SEQ ID NO: 534135 - RNA, 31 nt, Human
uuaugagcacaaugccaucacuuaacuauaa

SEQ ID NO: 534136 - RNA, 32 nt, Human
uuaugagcauuuuuaucaccuuuccucacaua

SEQ ID NO: 534137 - RNA, 32 nt, Human
uuaugagcuaccaaaacuaaauucuuucucug

SEQ ID NO: 534138 - RNA, 32 nt, Human
uuaugaggaugccaccaucaugacauaaucau

SEQ ID NO: 534139 - RNA, 32 nt, Human
uuaugaggaugccaccaucaugacauacucau

SEQ ID NO: 534140 - RNA, 20 nt, Human
uuaugaggauucaaugagga

SEQ ID NO: 534141 - RNA, 32 nt, Human
uuaugaggauuucuugggagucuuaauaaccu

SEQ ID NO: 534142 - RNA, 32 nt, Human
uuaugagggcuccacagacagaugggggaggc

SEQ ID NO: 534143 - RNA, 32 nt, Human
uuaugagggcuggagugcacuggagcaauccu

SEQ ID NO: 534144 - RNA, 27 nt, Human
uuaugaguaggccuguaacacggacgu

SEQ ID NO: 534145 - RNA, 32 nt, Human
uuaugagucgcugggccagggugaggaccugg

SEQ ID NO: 534146 - RNA, 32 nt, Human
uuaugagugaaaaguguuucuaaaaauauaga

SEQ ID NO: 534147 - RNA, 32 nt, Human
uuaugagugaauauggggagggcggggcaauc

SEQ ID NO: 534148 - RNA, 32 nt, Human
uuaugaguugcuuugggagacuuggagcucuc

SEQ ID NO: 534149 - RNA, 32 nt, Human
uuaugauaaggaugauaaaagcacuuacuucg

SEQ ID NO: 534150 - RNA, 32 nt, Human
uuaugauauauacuuacuuaagcuucuauuua

SEQ ID NO: 534151 - RNA, 32 nt, Human
uuaugaucuguuuccaaaauuggcacaaagug

SEQ ID NO: 534152 - RNA, 32 nt, Human
uuaugaugaccagggccacauccggagggggc

SEQ ID NO: 534153 - RNA, 32 nt, Human
uuaugaugagaccagaugcaguggcucaggcc

SEQ ID NO: 534154 - RNA, 32 nt, Human
uuaugaugcuaaacugacauuauuucuucucu

SEQ ID NO: 534155 - RNA, 32 nt, Human
uuaugauguuggcuuggcuuuguauuuuuaau

SEQ ID NO: 534156 - RNA, 32 nt, Human
uuaugauugcagcccucagccugggcugccug

SEQ ID NO: 534157 - RNA, 31 nt, Human
uuaugauugcguuucugaccugagauguaug

SEQ ID NO: 534158 - RNA, 32 nt, Human
uuaugauugcguuucugaccugagauguaugc

SEQ ID NO: 534159 - RNA, 32 nt, Human
uuaugauuguuuccuuuucucaugcuucuuau

SEQ ID NO: 534160 - RNA, 32 nt, Human
uuaugauuguuuuaaacucaggaacagagaca

SEQ ID NO: 534161 - RNA, 32 nt, Human
uuaugcaauuccuucuguugcauuggagaaac

SEQ ID NO: 534162 - RNA, 32 nt, Human
uuaugcacuuucaugguauagucuuucucagu

SEQ ID NO: 534163 - RNA, 32 nt, Human
uuaugcagaagagacagaggagaggaaaggga

SEQ ID NO: 534164 - RNA, 32 nt, Human
uuaugcagacacacaaguggucuggacaugag

SEQ ID NO: 534165 - RNA, 32 nt, Human
uuaugcagauguucacugggaggaccugccag

SEQ ID NO: 534166 - RNA, 32 nt, Human
uuaugcaggagcagguucauguccuuggaguu

SEQ ID NO: 534167 - RNA, 32 nt, Human
uuaugcagguggagagaaaacaggagaguagc

SEQ ID NO: 534168 - RNA, 32 nt, Human
uuaugcagugccugggacacaguaggcacuca

SEQ ID NO: 534169 - RNA, 32 nt, Human
uuaugcauauaguaaguauuacauucuuagag

SEQ ID NO: 534170 - RNA, 32 nt, Human
uuaugcauauuucaucuggaacuuuccccuuu

SEQ ID NO: 534171 - RNA, 32 nt, Human
uuaugcaucccucagugccaucccuuguaucc

SEQ ID NO: 534172 - RNA, 32 nt, Human
uuaugcauguguggucugucucuacaaucuga

SEQ ID NO: 534173 - RNA, 32 nt, Human
uuaugccaacagcaaagcugucacacuggagg

SEQ ID NO: 534174 - RNA, 32 nt, Human
uuaugccaacauuuucuuuucuguuaagguug

SEQ ID NO: 534175 - RNA, 32 nt, Human
uuaugccaagggaagcgggaccucuuuuguca

SEQ ID NO: 534176 - RNA, 32 nt, Human
uuaugccacugcacuccagccugggcaacaga

SEQ ID NO: 534177 - RNA, 32 nt, Human
uuaugccacugcacuccagccugggugacaga

SEQ ID NO: 534178 - RNA, 32 nt, Human
uuaugccacugcacuccagccuggugacagag

SEQ ID NO: 534179 - RNA, 32 nt, Human
uuaugccacugcacuucagccugggugacaga

SEQ ID NO: 534180 - RNA, 32 nt, Human
uuaugccacugcuuuccagccugggcaacaua

SEQ ID NO: 534181 - RNA, 32 nt, Human
uuaugccacuguacuccagccugggugacaga

SEQ ID NO: 534182 - RNA, 32 nt, Human
uuaugccacuguacuccagcgugggugacaga

SEQ ID NO: 534183 - RNA, 32 nt, Human
uuaugccagagccucagcucuagggcugccug

SEQ ID NO: 534184 - RNA, 32 nt, Human
uuaugccaguuggggagggaaggacuaaaaau

SEQ ID NO: 534185 - RNA, 32 nt, Human
uuaugccaugauaaauacaagauugguaaaua

SEQ ID NO: 534186 - RNA, 32 nt, Human
uuaugccauuacacuccagccugggcaacagc

SEQ ID NO: 534187 - RNA, 32 nt, Human
uuaugccauugcacuccagccugggugacaaa

SEQ ID NO: 534188 - RNA, 32 nt, Human
uuaugccauugcacuccagccugggugacaga

SEQ ID NO: 534189 - RNA, 32 nt, Human
uuaugcccauaauaaucccagcacuuugggag

SEQ ID NO: 534190 - RNA, 32 nt, Human
uuaugccccugcacaucagccugggugauaga

SEQ ID NO: 534191 - RNA, 32 nt, Human
uuaugccggaagcaaaaaccaaaacuuuuugu

SEQ ID NO: 534192 - RNA, 32 nt, Human
uuaugccuaaagccuggugauuauucauuuaa

SEQ ID NO: 534193 - RNA, 19 nt, Human
uuaugccuaaaucucuaua

SEQ ID NO: 534194 - RNA, 32 nt, Human
uuaugccuaagggaccugcucccauuuucuuu

SEQ ID NO: 534195 - RNA, 32 nt, Human
uuaugccuaggagguugaggcugcagugagcu

SEQ ID NO: 534196 - RNA, 32 nt, Human
uuaugccuccaccccuucuuauucauuuacuu

SEQ ID NO: 534197 - RNA, 32 nt, Human
uuaugccucugucucuuucucucccuccuccu

SEQ ID NO: 534198 - RNA, 32 nt, Human
uuaugccugcaauuuuaccuagcuaccacuag

SEQ ID NO: 534199 - RNA, 32 nt, Human
uuaugccuguaaucccacuuugggaggccaag

SEQ ID NO: 534200 - RNA, 32 nt, Human
uuaugccuguaaucccagcacucugggaggcc

SEQ ID NO: 534201 - RNA, 32 nt, Human
uuaugccuguaaucccagcacugugggaggcu

SEQ ID NO: 534202 - RNA, 32 nt, Human
uuaugccuguaaucccagcacuuggggaagcc

SEQ ID NO: 534203 - RNA, 32 nt, Human
uuaugccuguaaucccagcacuuuggaaggcc

SEQ ID NO: 534204 - RNA, 32 nt, Human
uuaugccuguaaucccagcacuuugggaggcc

SEQ ID NO: 534205 - RNA, 32 nt, Human
uuaugccuguaaucccagcacuuugggaggcu

SEQ ID NO: 534206 - RNA, 32 nt, Human
uuaugccuguaaucccagcaugcugggaggcc

SEQ ID NO: 534207 - RNA, 32 nt, Human
uuaugccuguaaucccgguacuuugggaggcu

SEQ ID NO: 534208 - RNA, 32 nt, Human
uuaugccuguaaucccugcacuuugggaagcc

SEQ ID NO: 534209 - RNA, 32 nt, Human
uuaugccuguaauccuagaacuuugggaggcc

SEQ ID NO: 534210 - RNA, 32 nt, Human
uuaugccuguaauccuagcgcuuugggaggcc

SEQ ID NO: 534211 - RNA, 32 nt, Human
uuaugccuguaauugcagcacuuuuagaggcu

SEQ ID NO: 534212 - RNA, 32 nt, Human
uuaugccuuauucauaucacaguuagaucacc

SEQ ID NO: 534213 - RNA, 32 nt, Human
uuaugccuucauucucuuacauuugugugggu

SEQ ID NO: 534214 - RNA, 32 nt, Human
uuaugcgggaaagagggagggggacuccagga

SEQ ID NO: 534215 - RNA, 32 nt, Human
uuaugcguguccacaguacacccucccucucc

SEQ ID NO: 534216 - RNA, 32 nt, Human
uuaugcguuugacugaaaaagacacuguauua

SEQ ID NO: 534217 - RNA, 32 nt, Human
uuaugcuccuuaugagaaucuaaugccugaug

SEQ ID NO: 534218 - RNA, 32 nt, Human
uuaugcugaaauuggcuucugccggcuuaucu

SEQ ID NO: 534219 - RNA, 28 nt, Human
uuaugcugaguugcugccuuuccccguc

SEQ ID NO: 534220 - RNA, 32 nt, Human
uuaugcugccauccuuuuugcaugucaaauaa

SEQ ID NO: 534221 - RNA, 32 nt, Human
uuaugcugccuuucuacucuguucuugcuguc

SEQ ID NO: 534222 - RNA, 32 nt, Human
uuaugcugcuacuugccaggaacagguuggga

SEQ ID NO: 534223 - RNA, 32 nt, Human
uuaugcugcucacugauccuucugcauauuua

SEQ ID NO: 534224 - RNA, 32 nt, Human
uuaugcugcucucccagggccugggugugcuu

SEQ ID NO: 534225 - RNA, 32 nt, Human
uuaugcugcugcacuccagccuggacaacaga

SEQ ID NO: 534226 - RNA, 32 nt, Human
uuaugcuggagcucuguuuugcuuagaaauaa

SEQ ID NO: 534227 - RNA, 32 nt, Human
uuaugcuggauuccguuuaaagaagacauuau

SEQ ID NO: 534228 - RNA, 32 nt, Human
uuaugcugucauaucagagucaagugaacugu

SEQ ID NO: 534229 - RNA, 32 nt, Human
uuaugcuuagcagcuucuucacuguuuugaaa

SEQ ID NO: 534230 - RNA, 32 nt, Human
uuaugcuuauuugccauucacauauuuucuug

SEQ ID NO: 534231 - RNA, 32 nt, Human
uuaugcuucaugggauuaacacugcuuuucca

SEQ ID NO: 534232 - RNA, 32 nt, Human
uuaugcuuccuucuuuccaugacuaauucuuc

SEQ ID NO: 534233 - RNA, 32 nt, Human
uuaugcuucuuucaguauguuuugccauguua

SEQ ID NO: 534234 - RNA, 32 nt, Human
uuaugcuugggaggucgaggcugcagugaguc

SEQ ID NO: 534235 - RNA, 32 nt, Human
uuaugcuugguacaagcuuaugcugucuuaaa

SEQ ID NO: 534236 - RNA, 32 nt, Human
uuaugcuuguaaucccaacacuuagggaguca

SEQ ID NO: 534237 - RNA, 32 nt, Human
uuaugcuuguaaucccagaacuuugggaaucu

SEQ ID NO: 534238 - RNA, 32 nt, Human
uuaugcuuguaaucccagcacuuugggaggcc

SEQ ID NO: 534239 - RNA, 24 nt, Human
uuaugcuugucuccugacugcucu

SEQ ID NO: 534240 - RNA, 32 nt, Human
uuaugcuuuagcugcagguggggacgacaaac

SEQ ID NO: 534241 - RNA, 32 nt, Human
uuaugcuuuguugcaucucugcuuucuaauaa

SEQ ID NO: 534242 - RNA, 32 nt, Human
uuaugcuuuucaggcucauuuguacucucuuc

SEQ ID NO: 534243 - RNA, 32 nt, Human
uuauggaaauuggggaaagugguaaaaugagu

SEQ ID NO: 534244 - RNA, 32 nt, Human
uuauggaaccuacauaugggucuggaaaaacu

SEQ ID NO: 534245 - RNA, 32 nt, Human
uuauggaagccugucuugccuuugacuugcaa

SEQ ID NO: 534246 - RNA, 32 nt, Human
uuauggaagugagaggaagcaaacaagcuucu

SEQ ID NO: 534247 - RNA, 23 nt, Human
uuauggaauguagucgacggaua

SEQ ID NO: 534248 - RNA, 32 nt, Human
uuauggaccaaaacuugaaucacugcaaaaug

SEQ ID NO: 534249 - RNA, 32 nt, Human
uuauggacuauacacaccuauuauuauauucu

SEQ ID NO: 534250 - RNA, 32 nt, Human
uuauggacugagaaagggagaacaugguaggg

SEQ ID NO: 534251 - RNA, 32 nt, Human
uuauggacugaggacuggugacuggucuguga

SEQ ID NO: 534252 - RNA, 32 nt, Human
uuauggagaaccuggggaucacagacuucauc

SEQ ID NO: 534253 - RNA, 32 nt, Human
uuauggagacccauuuccugaucucugagacu

SEQ ID NO: 534254 - RNA, 32 nt, Human
uuauggagauggggucuugcuuuguugcccag

SEQ ID NO: 534255 - RNA, 32 nt, Human
uuauggagcucucagugugugaaaguucuaaa

SEQ ID NO: 534256 - RNA, 32 nt, Human
uuauggaggaggaggagaauguggaagaggua

SEQ ID NO: 534257 - RNA, 32 nt, Human
uuauggaggaggugaugguggauauaauggau

SEQ ID NO: 534258 - RNA, 32 nt, Human
uuauggauccaaggagacuugcuuuuucaguc

SEQ ID NO: 534259 - RNA, 32 nt, Human
uuauggauucuaggugggaagaaacaaaacaa

SEQ ID NO: 534260 - RNA, 32 nt, Human
uuauggauuucacgccccuaucaugcccuggc

SEQ ID NO: 534261 - RNA, 32 nt, Human
uuauggcacauagacaucagcuaggcuuuugg

SEQ ID NO: 534262 - RNA, 32 nt, Human
uuauggcaccuugcagcuucuucuccacgagu

SEQ ID NO: 534263 - RNA, 32 nt, Human
uuauggcagggaacagguggggaacuaagauc

SEQ ID NO: 534264 - RNA, 32 nt, Human
uuauggcauuucccaggguucugugauuuccc

SEQ ID NO: 534265 - RNA, 32 nt, Human
uuauggccacaguguauaacuuuuauuaaaau

SEQ ID NO: 534266 - RNA, 32 nt, Human
uuauggccauuuuccuuaucucccucccaagg

SEQ ID NO: 534267 - RNA, 32 nt, Human
uuauggcccuucuguucucaggauggagagaa

SEQ ID NO: 534268 - RNA, 32 nt, Human
uuauggccucugcacuccagccugggugacag

SEQ ID NO: 534269 - RNA, 32 nt, Human
uuauggcgcuugcauuuugguggaggaagaca

SEQ ID NO: 534270 - RNA, 32 nt, Human
uuauggcucacugcaguuucaaccucccagau

SEQ ID NO: 534271 - RNA, 32 nt, Human
uuauggcucacugcggccucgacuuuccaguc

SEQ ID NO: 534272 - RNA, 32 nt, Human
uuauggcuccaccuccccaccucccucccccg

SEQ ID NO: 534273 - RNA, 32 nt, Human
uuauggcuccucccucccauguccucagaccc

SEQ ID NO: 534274 - RNA, 32 nt, Human
uuauggcuuauaaaacagugcauaaucugacu

SEQ ID NO: 534275 - RNA, 32 nt, Human
uuauggcuucaaggucuacaauuuauguguau

SEQ ID NO: 534276 - RNA, 32 nt, Human
uuauggcuucacugcagguaaugccuuucccu

SEQ ID NO: 534277 - RNA, 32 nt, Human
uuaugggaaaguuuucucugaagccagggaga

SEQ ID NO: 534278 - RNA, 32 nt, Human
uuaugggaaguuuggcagaaugugaguaucuu

SEQ ID NO: 534279 - RNA, 32 nt, Human
uuaugggacaaagccuagaaaagagaaaugua

SEQ ID NO: 534280 - RNA, 32 nt, Human
uuaugggaggcugagagacugagggucuuucu

SEQ ID NO: 534281 - RNA, 32 nt, Human
uuaugggaggcugaggcgggcagaucaugagg

SEQ ID NO: 534282 - RNA, 32 nt, Human
uuaugggcagaggcacaggcauccucagcagc

SEQ ID NO: 534283 - RNA, 32 nt, Human
uuaugggcaugacugcguguucccuuccccca

SEQ ID NO: 534284 - RNA, 32 nt, Human
uuaugggcgcugugggcccugaaggaagaccu

SEQ ID NO: 534285 - RNA, 32 nt, Human
uuaugggcucagaaagggaagaagaauugaau

SEQ ID NO: 534286 - RNA, 32 nt, Human
uuaugggcuuaagaagaagaccaccuugucua

SEQ ID NO: 534287 - RNA, 32 nt, Human
uuaugggcuuuugccacauggaggcuuugugu

SEQ ID NO: 534288 - RNA, 32 nt, Human
uuauggggagagaggcugccaggggccaggcu

SEQ ID NO: 534289 - RNA, 32 nt, Human
uuauggggagugagagagagggcacgagaacc

SEQ ID NO: 534290 - RNA, 32 nt, Human
uuauggggcaggcaaugugugcggagauggga

SEQ ID NO: 534291 - RNA, 32 nt, Human
uuauggggcagguggagggcccggcugacuca

SEQ ID NO: 534292 - RNA, 32 nt, Human
uuauggggucugcuugagggcacuaaccucaa

SEQ ID NO: 534293 - RNA, 32 nt, Human
uuaugggugccugccaccacacccagcuaauu

SEQ ID NO: 534294 - RNA, 32 nt, Human
uuauggguugggggugguaggcaggugagcgu

SEQ ID NO: 534295 - RNA, 32 nt, Human
uuauggguuuggcuuaguugaagaggaaaggg

SEQ ID NO: 534296 - RNA, 32 nt, Human
uuaugguaaagaugggagcccaguuucacugc

SEQ ID NO: 534297 - RNA, 32 nt, Human
uuauggucuucaucccuccaucaaccuuaauc

SEQ ID NO: 534298 - RNA, 32 nt, Human
uuauggugcuucuguuggcauaguuggggaaa

SEQ ID NO: 534299 - RNA, 32 nt, Human
uuaugguuaaugcucaguacaaauuaacgauu

SEQ ID NO: 534300 - RNA, 32 nt, Human
uuaugguucacugcagacuccaccucuccagg

SEQ ID NO: 534301 - RNA, 32 nt, Human
uuaugguuguagugugugugggaaaaccuuua

SEQ ID NO: 534302 - RNA, 32 nt, Human
uuaugguuugcaucugaaagcaguuaaaucuu

SEQ ID NO: 534303 - RNA, 17 nt, Human
uuauguaaaauggggug

SEQ ID NO: 534304 - RNA, 20 nt, Human
uuauguaaaauggugcagua

SEQ ID NO: 534305 - RNA, 17 nt, Human
uuauguaaaauguagua

SEQ ID NO: 534306 - RNA, 18 nt, Human
uuauguaaaauugcggua

SEQ ID NO: 534307 - RNA, 18 nt, Human
uuauguaaacgucuggua

SEQ ID NO: 534308 - RNA, 18 nt, Human
uuauguaaauaccuagua

SEQ ID NO: 534309 - RNA, 32 nt, Human
uuauguaacuucacaucucugagaauggggga

SEQ ID NO: 534310 - RNA, 32 nt, Human
uuauguaagguaauuaugaaagacauugguga

SEQ ID NO: 534311 - RNA, 32 nt, Human
uuauguaaucaggacccacugcuguaugaguc

SEQ ID NO: 534312 - RNA, 18 nt, Human
uuauguaaugcauucagu

SEQ ID NO: 534313 - RNA, 32 nt, Human
uuauguacaagauggaaaauccccuaccccuc

SEQ ID NO: 534314 - RNA, 32 nt, Human
uuauguacuaccugauguguauaaggacaggu

SEQ ID NO: 534315 - RNA, 32 nt, Human
uuauguagaacuccaggagggacauuaaauca

SEQ ID NO: 534316 - RNA, 32 nt, Human
uuauguagaccagaagcugcaauauacaauga

SEQ ID NO: 534317 - RNA, 32 nt, Human
uuauguagguauuguuaaaaggcuagagccua

SEQ ID NO: 534318 - RNA, 32 nt, Human
uuauguaguuuaggcuggaaaugguuucacuu

SEQ ID NO: 534319 - RNA, 32 nt, Human
uuauguauaagaaugcuuuuuaaagcacaugu

SEQ ID NO: 534320 - RNA, 32 nt, Human
uuauguauuaacauggcguguuuauuuuugua

SEQ ID NO: 534321 - RNA, 32 nt, Human
uuauguauuauccacacgauguuuucacagag

SEQ ID NO: 534322 - RNA, 32 nt, Human
uuauguauuuauuuucuuguugccucaaaaga

SEQ ID NO: 534323 - RNA, 32 nt, Human
uuauguauuugguggagacaaugggaagacca

SEQ ID NO: 534324 - RNA, 32 nt, Human
uuaugucaagggcagcuuugcucauauuuccc

SEQ ID NO: 534325 - RNA, 31 nt, Human
uuaugucacagcuggccugcagcaggucccu

SEQ ID NO: 534326 - RNA, 32 nt, Human
uuaugucaccacugguaccucaguuuccucau

SEQ ID NO: 534327 - RNA, 32 nt, Human
uuaugucacugcacuccauccugggugacaag

SEQ ID NO: 534328 - RNA, 27 nt, Human
uuaugucacugcacuucucuacucuca

SEQ ID NO: 534329 - RNA, 32 nt, Human
uuaugucacugcagagguaugaaaaggagagc

SEQ ID NO: 534330 - RNA, 32 nt, Human
uuaugucagccaguguuucaggcacaggaagu

SEQ ID NO: 534331 - RNA, 32 nt, Human
uuaugucaggugaacuggcaugcugaacauau

SEQ ID NO: 534332 - RNA, 32 nt, Human
uuaugucagucugaugaacagauggcuuagcc

SEQ ID NO: 534333 - RNA, 32 nt, Human
uuaugucauagaaauuaauaugauacuuuaaa

SEQ ID NO: 534334 - RNA, 32 nt, Human
uuaugucauaggcuacuaugcaucagaaucac

SEQ ID NO: 534335 - RNA, 32 nt, Human
uuaugucaucccuucuucuccagacagaagau

SEQ ID NO: 534336 - RNA, 32 nt, Human
uuaugucaugaucuuaagcuuccugagguugc

SEQ ID NO: 534337 - RNA, 32 nt, Human
uuauguccaugaaaucaagagugugauguucu

SEQ ID NO: 534338 - RNA, 31 nt, Human
uuauguccccugccagggccugucucugacu

SEQ ID NO: 534339 - RNA, 32 nt, Human
uuauguccccuuauguuccugguacuggagcu

SEQ ID NO: 534340 - RNA, 32 nt, Human
uuaugucccuggcacaugaauaaacuuugcug

SEQ ID NO: 534341 - RNA, 32 nt, Human
uuauguccucuucucccuuuccaucuuucagc

SEQ ID NO: 534342 - RNA, 32 nt, Human
uuauguccugaacgugaaauucugucaacacu

SEQ ID NO: 534343 - RNA, 32 nt, Human
uuaugucucucugaccuaugggcuacuuggga

SEQ ID NO: 534344 - RNA, 32 nt, Human
uuaugucugcugucaugucugggucuuuaggg

SEQ ID NO: 534345 - RNA, 32 nt, Human
uuaugucugcuuguaaaaguuucaaaauaugu

SEQ ID NO: 534346 - RNA, 32 nt, Human
uuaugucuguaaucccagcacuuuugagaggc

SEQ ID NO: 534347 - RNA, 32 nt, Human
uuaugucuuaccagauagaguugcagggaagg

SEQ ID NO: 534348 - RNA, 32 nt, Human
uuaugucuucuccuaguacaaccaaacagaua

SEQ ID NO: 534349 - RNA, 32 nt, Human
uuaugucuucuuuucccuuuccaucuuucagc

SEQ ID NO: 534350 - RNA, 32 nt, Human
uuaugucuuucuccucuuccuauucugucauc

SEQ ID NO: 534351 - RNA, 32 nt, Human
uuaugugaaaucuaacuguaaugagguccuuu

SEQ ID NO: 534352 - RNA, 32 nt, Human
uuaugugaacaugcgcugugugcugcuugcuu

SEQ ID NO: 534353 - RNA, 32 nt, Human
uuaugugaaggaugaaaggugggugaaaggac

SEQ ID NO: 534354 - RNA, 32 nt, Human
uuaugugacucauguguccucuuagaauccca

SEQ ID NO: 534355 - RNA, 32 nt, Human
uuaugugacuucuuuuucuuuuaguucuauuc

SEQ ID NO: 534356 - RNA, 18 nt, Human
uuaugugagccuucagua

SEQ ID NO: 534357 - RNA, 32 nt, Human
uuaugugaucagauuucuguuuaggaagauca

SEQ ID NO: 534358 - RNA, 16 nt, Human
uuaugugauugcagua

SEQ ID NO: 534359 - RNA, 32 nt, Human
uuaugugcaagacuuuguguuguagucuagac

SEQ ID NO: 534360 - RNA, 32 nt, Human
uuaugugcaauacuuauuucaaacuuuugaaa

SEQ ID NO: 534361 - RNA, 32 nt, Human
uuaugugcccaucacucucagagaccacguuu

SEQ ID NO: 534362 - RNA, 32 nt, Human
uuaugugcuacgauuuaacugcagccuugaac

SEQ ID NO: 534363 - RNA, 32 nt, Human
uuaugugggguugucaaaacuccacucagcac

SEQ ID NO: 534364 - RNA, 32 nt, Human
uuaugugggugaugccuuuuucuuuuaagccc

SEQ ID NO: 534365 - RNA, 21 nt, Human
uuauguggucccacaccaccc

SEQ ID NO: 534366 - RNA, 32 nt, Human
uuaugugguguuuguagucugauagagcuuga

SEQ ID NO: 534367 - RNA, 32 nt, Human
uuauguguaguugucucucuucagacucucag

SEQ ID NO: 534368 - RNA, 32 nt, Human
uuauguguaugucggugugccuagguagcucc

SEQ ID NO: 534369 - RNA, 32 nt, Human
uuaugugucucagaauauuuuugaggcgaagg

SEQ ID NO: 534370 - RNA, 32 nt, Human
uuaugugugagcuuuggcaugaccccuaguac

SEQ ID NO: 534371 - RNA, 32 nt, Human
uuaugugugccaagggaguauuuucacaaagu

SEQ ID NO: 534372 - RNA, 32 nt, Human
uuaugugugccuggacacagacagagacagag

SEQ ID NO: 534373 - RNA, 32 nt, Human
uuauguguggcaggcacacagcuuugaauguu

SEQ ID NO: 534374 - RNA, 32 nt, Human
uuauguguggcaggcacgcagcuuugaauguu

SEQ ID NO: 534375 - RNA, 32 nt, Human
uuaugugugguggacugcagagcugcuuccac

SEQ ID NO: 534376 - RNA, 32 nt, Human
uuauguguugagaucagugacugcuggauagu

SEQ ID NO: 534377 - RNA, 32 nt, Human
uuauguguugggggagagauggagggguguug

SEQ ID NO: 534378 - RNA, 32 nt, Human
uuauguguuggugccaucgcacaugcucaaua

SEQ ID NO: 534379 - RNA, 32 nt, Human
uuauguguuucugcuaauagaggaaucauagc

SEQ ID NO: 534380 - RNA, 22 nt, Human
uuauguguuugucaauguacug

SEQ ID NO: 534381 - RNA, 32 nt, Human
uuauguuaagacuaucaaacacaguguugccu

SEQ ID NO: 534382 - RNA, 32 nt, Human
uuauguuacaauauucuuuauuccuaucuagu

SEQ ID NO: 534383 - RNA, 32 nt, Human
uuauguuaucaccccaccacuaccuccauggu

SEQ ID NO: 534384 - RNA, 32 nt, Human
uuauguucaagcaauucuccuuccuuagccuc

SEQ ID NO: 534385 - RNA, 32 nt, Human
uuauguucaaggugagaauaagaaauagccaa

SEQ ID NO: 534386 - RNA, 32 nt, Human
uuauguucacugcacucugauuuucuguaggu

SEQ ID NO: 534387 - RNA, 32 nt, Human
uuauguucagaagcugucccacugugguaaaa

SEQ ID NO: 534388 - RNA, 32 nt, Human
uuauguucauucuccuuaauuccuuaacaauc

SEQ ID NO: 534389 - RNA, 32 nt, Human
uuauguuccagcguuuucuacucugaauaguu

SEQ ID NO: 534390 - RNA, 32 nt, Human
uuauguucccuuucuggcauagcauucacuug

SEQ ID NO: 534391 - RNA, 32 nt, Human
uuauguucuaguucuugaaagaggcagugagg

SEQ ID NO: 534392 - RNA, 32 nt, Human
uuauguucucagagagauuaauugcuaccgcu

SEQ ID NO: 534393 - RNA, 32 nt, Human
uuauguucuccucugcccgaagucccugucag

SEQ ID NO: 534394 - RNA, 32 nt, Human
uuauguucugguugaaaucaccugugugucuu

SEQ ID NO: 534395 - RNA, 32 nt, Human
uuauguucuguguuauuuuaucuuuaauuaau

SEQ ID NO: 534396 - RNA, 32 nt, Human
uuauguucuucauuaaaaaucuuaucuuggac

SEQ ID NO: 534397 - RNA, 32 nt, Human
uuauguucuugcauuauaauuuuauccuaacc

SEQ ID NO: 534398 - RNA, 32 nt, Human
uuauguugacaaauuauuuaaaggaauuacug

SEQ ID NO: 534399 - RNA, 32 nt, Human
uuauguugcaccacugugaaggucuagaugca

SEQ ID NO: 534400 - RNA, 32 nt, Human
uuauguugcaguaacguacaaccucaucauuu

SEQ ID NO: 534401 - RNA, 32 nt, Human
uuauguugcauuuucucagcuccuggggaugg

SEQ ID NO: 534402 - RNA, 32 nt, Human
uuauguugcuccaguaaaaucuugccuggaaa

SEQ ID NO: 534403 - RNA, 32 nt, Human
uuauguuggccaggcuggucuccaacuccuga

SEQ ID NO: 534404 - RNA, 30 nt, Human
uuauguugggagguaggggcacaauuguca

SEQ ID NO: 534405 - RNA, 32 nt, Human
uuauguugggcaagacuguaagauggcugauc

SEQ ID NO: 534406 - RNA, 32 nt, Human
uuauguuuagggagaccaggaggagacaugga

SEQ ID NO: 534407 - RNA, 32 nt, Human
uuauguuuauucaccagucuuugauuaaauaa

SEQ ID NO: 534408 - RNA, 32 nt, Human
uuauguuuauucaccagucuuugauuaaauua

SEQ ID NO: 534409 - RNA, 32 nt, Human
uuauguuuucagugcugugucauuccaaauaa

SEQ ID NO: 534410 - RNA, 32 nt, Human
uuauuaaaagcagcacagauuccacauuuuua

SEQ ID NO: 534411 - RNA, 32 nt, Human
uuauuaaaauaacauaauugagggaccaucag

SEQ ID NO: 534412 - RNA, 32 nt, Human
uuauuaaacaaagcuccuacugccaucauacu

SEQ ID NO: 534413 - RNA, 32 nt, Human
uuauuaaacugaauaguucaggagacuuuaca

SEQ ID NO: 534414 - RNA, 32 nt, Human
uuauuaaagcuguaucucugaagacuguguca

SEQ ID NO: 534415 - RNA, 21 nt, Human
uuauuaaaggaaauccaugug

SEQ ID NO: 534416 - RNA, 32 nt, Human
uuauuaaauuuagucauaaucaucucaaggac

SEQ ID NO: 534417 - RNA, 32 nt, Human
uuauuaacaauucccccagaacauggaaauaa

SEQ ID NO: 534418 - RNA, 32 nt, Human
uuauuaaccaguaguguggaaauacuaguuuu

SEQ ID NO: 534419 - RNA, 32 nt, Human
uuauuaaccauggucugagaguuguuuuuguu

SEQ ID NO: 534420 - RNA, 32 nt, Human
uuauuaagacagcaucuugcuccucacccagg

SEQ ID NO: 534421 - RNA, 32 nt, Human
uuauuaaguacauuugaauugucuccugacua

SEQ ID NO: 534422 - RNA, 32 nt, Human
uuauuaaguuuuuaauucauagucacuaaaga

SEQ ID NO: 534423 - RNA, 32 nt, Human
uuauuaauaacaaaauacaauucuucccucua

SEQ ID NO: 534424 - RNA, 32 nt, Human
uuauuaaucauaggagcuugcagucucacuag

SEQ ID NO: 534425 - RNA, 32 nt, Human
uuauuaauguuuuucauguaacaaacuaaacu

SEQ ID NO: 534426 - RNA, 32 nt, Human
uuauuacaaaauagaauucaauaaccauauug

SEQ ID NO: 534427 - RNA, 22 nt, Human
uuauuacaaagacccaaaugaa

SEQ ID NO: 534428 - RNA, 32 nt, Human
uuauuacaaaggaguagggaugauaggaucug

SEQ ID NO: 534429 - RNA, 32 nt, Human
uuauuacaaaggauauuaugaaggaaacagau

SEQ ID NO: 534430 - RNA, 32 nt, Human
uuauuacaagaagcaacagguuauugacauua

SEQ ID NO: 534431 - RNA, 32 nt, Human
uuauuacaauuucaaagcuacacuucauuaaa

SEQ ID NO: 534432 - RNA, 32 nt, Human
uuauuacauucucuuuuucucucccaugacua

SEQ ID NO: 534433 - RNA, 32 nt, Human
uuauuacauugaauuauauaaagugcauguua

SEQ ID NO: 534434 - RNA, 32 nt, Human
uuauuacauugucaauuaugcauuuguaauuu

SEQ ID NO: 534435 - RNA, 22 nt, Human
uuauuacauuugugucaaugaa

SEQ ID NO: 534436 - RNA, 32 nt, Human
uuauuaccagagaauuuuauuugguugcuuuu

SEQ ID NO: 534437 - RNA, 32 nt, Human
uuauuacccacuggguaacagugguuacccac

SEQ ID NO: 534438 - RNA, 32 nt, Human
uuauuaccguccccuucauuguuuucaaagac

SEQ ID NO: 534439 - RNA, 32 nt, Human
uuauuaccuuucacuauuuauaauaaaggaau

SEQ ID NO: 534440 - RNA, 32 nt, Human
uuauuacgucauaaaccauugaaaacacaucu

SEQ ID NO: 534441 - RNA, 32 nt, Human
uuauuacuaaugcucugaucuguccaaacuca

SEQ ID NO: 534442 - RNA, 32 nt, Human
uuauuacuacugcuuuacugccuguagcaggu

SEQ ID NO: 534443 - RNA, 32 nt, Human
uuauuacucaauucaagaaaagaaagggcuaa

SEQ ID NO: 534444 - RNA, 32 nt, Human
uuauuacuccuuaaccacuugcauucuggcuu

SEQ ID NO: 534445 - RNA, 32 nt, Human
uuauuacuuuguaauaugccacugugaguacu

SEQ ID NO: 534446 - RNA, 32 nt, Human
uuauuagaaauacauuuaaaaacaucgaguac

SEQ ID NO: 534447 - RNA, 32 nt, Human
uuauuagaaaugcagaaucugaagccccacuc

SEQ ID NO: 534448 - RNA, 32 nt, Human
uuauuagaauaucagcugcuuccuccucuggu

SEQ ID NO: 534449 - RNA, 32 nt, Human
uuauuagaccaaaagaggaagaggucguggua

SEQ ID NO: 534450 - RNA, 32 nt, Human
uuauuagagacaggguuucuccguguugguca

SEQ ID NO: 534451 - RNA, 32 nt, Human
uuauuagagacaggguuucuucauguugguca

SEQ ID NO: 534452 - RNA, 32 nt, Human
uuauuagcaaacauagcuggauuaagacaaag

SEQ ID NO: 534453 - RNA, 32 nt, Human
uuauuagcacaaaaucauucuuugcaacucaa

SEQ ID NO: 534454 - RNA, 32 nt, Human
uuauuagcacuucccgccccagggcacuacau

SEQ ID NO: 534455 - RNA, 32 nt, Human
uuauuagccaugugaacuuggccacaucacuu

SEQ ID NO: 534456 - RNA, 32 nt, Human
uuauuagccugaugaaugugaauugauuccug

SEQ ID NO: 534457 - RNA, 32 nt, Human
uuauuagcuuuguguguguccucuucccccaa

SEQ ID NO: 534458 - RNA, 32 nt, Human
uuauuaggaagaggaagaagagguagaaaaca

SEQ ID NO: 534459 - RNA, 32 nt, Human
uuauuaguagacaaagaggauguggauaauau

SEQ ID NO: 534460 - RNA, 32 nt, Human
uuauuaguccuagugugaaagcauuaauauua

SEQ ID NO: 534461 - RNA, 32 nt, Human
uuauuagugaaagagaccuguggauugaaaug

SEQ ID NO: 534462 - RNA, 32 nt, Human
uuauuagugauuaucucauaauuuuauuuucu

SEQ ID NO: 534463 - RNA, 32 nt, Human
uuauuaguucaacaaacuaauuuugagagagc

SEQ ID NO: 534464 - RNA, 32 nt, Human
uuauuaguuuuuaaaaucaguacuuuuuaaau

SEQ ID NO: 534465 - RNA, 32 nt, Human
uuauuaguuuuuaaaaucaguacuuuuuaaug

SEQ ID NO: 534466 - RNA, 32 nt, Human
uuauuaguuuuuaaaaucaguacuuuuuacug

SEQ ID NO: 534467 - RNA, 32 nt, Human
uuauuauacaauguagugaguccugcaugggu

SEQ ID NO: 534468 - RNA, 32 nt, Human
uuauuauagacggguuucaccauguuggccag

SEQ ID NO: 534469 - RNA, 32 nt, Human
uuauuauagguaaucaaugaauauugaaguuu

SEQ ID NO: 534470 - RNA, 32 nt, Human
uuauuauaugguaaagaggaaaaaggaaauac

SEQ ID NO: 534471 - RNA, 32 nt, Human
uuauuaucaaauacuucaauguagauauuucu

SEQ ID NO: 534472 - RNA, 32 nt, Human
uuauuaucaguuuaucuuucucccacuccacu

SEQ ID NO: 534473 - RNA, 32 nt, Human
uuauuauccaucggguuaccaugguaauccac

SEQ ID NO: 534474 - RNA, 32 nt, Human
uuauuaucuauguuacaaacccaaccauacag

SEQ ID NO: 534475 - RNA, 32 nt, Human
uuauuaucuuucucccuguuacuuggcugggg

SEQ ID NO: 534476 - RNA, 32 nt, Human
uuauuaugagccaggagauggggacugugaca

SEQ ID NO: 534477 - RNA, 32 nt, Human
uuauuaugaugguuguaaugaagauuaugagu

SEQ ID NO: 534478 - RNA, 32 nt, Human
uuauuaugcacauuguuuuuccugccuuuuua

SEQ ID NO: 534479 - RNA, 32 nt, Human
uuauuauggaaaacauuucaaguuuacuccuu

SEQ ID NO: 534480 - RNA, 29 nt, Human
uuauuauggcugcuguuguccaacagaac

SEQ ID NO: 534481 - RNA, 32 nt, Human
uuauuauguauguacaccauauaugaauaaac

SEQ ID NO: 534482 - RNA, 29 nt, Human
uuauuaugucuguguucccuugggacuca

SEQ ID NO: 534483 - RNA, 32 nt, Human
uuauuauguguauccccagcuauguaugcagc

SEQ ID NO: 534484 - RNA, 32 nt, Human
uuauuauuaaagauugcuugguagugaaaagg

SEQ ID NO: 534485 - RNA, 32 nt, Human
uuauuauuaacugcucuuuuucccucuggugg

SEQ ID NO: 534486 - RNA, 32 nt, Human
uuauuauuguaauuagaucuucacaaaguugu

SEQ ID NO: 534487 - RNA, 32 nt, Human
uuauuauuguauucaaaauucauuguguauau

SEQ ID NO: 534488 - RNA, 32 nt, Human
uuauuauuguucucauuuuauagaugagaaag

SEQ ID NO: 534489 - RNA, 32 nt, Human
uuauuauuuaguuuuuacaguaacaugaauaa

SEQ ID NO: 534490 - RNA, 32 nt, Human
uuauuauuucaagggucacacaggguuaaguu

SEQ ID NO: 534491 - RNA, 32 nt, Human
uuauuauuugagauggagucucacucugucac

SEQ ID NO: 534492 - RNA, 32 nt, Human
uuauuauuugugauguucugucuuccuuguca

SEQ ID NO: 534493 - RNA, 32 nt, Human
uuauucaaaaucacugcuaucuuugggacuaa

SEQ ID NO: 534494 - RNA, 32 nt, Human
uuauucaaaaugaucagugccaggagauggac

SEQ ID NO: 534495 - RNA, 32 nt, Human
uuauucaaagaaauaucugagcucuuugcacu

SEQ ID NO: 534496 - RNA, 32 nt, Human
uuauucaaccuacaggaggccacugcaucaac

SEQ ID NO: 534497 - RNA, 32 nt, Human
uuauucaagugcuugcccagugcuucuugaaa

SEQ ID NO: 534498 - RNA, 32 nt, Human
uuauucacauuugucugcuggaagaguuuauc

SEQ ID NO: 534499 - RNA, 32 nt, Human
uuauucaccaauaaauuauugacuacagagca

SEQ ID NO: 534500 - RNA, 32 nt, Human
uuauucacgacacacuucuucccuucacucuc

SEQ ID NO: 534501 - RNA, 32 nt, Human
uuauucagaaaugguagcuauucuauaccuau

SEQ ID NO: 534502 - RNA, 32 nt, Human
uuauucagguauaaaaacaagagaucauaaua

SEQ ID NO: 534503 - RNA, 32 nt, Human
uuauucaguaggaacucucuucugccugguuu

SEQ ID NO: 534504 - RNA, 32 nt, Human
uuauucagugugaccaggaugggcgggagggg

SEQ ID NO: 534505 - RNA, 32 nt, Human
uuauucaguuuuuaaagggaaaaagggcguga

SEQ ID NO: 534506 - RNA, 32 nt, Human
uuauucauacaaaacuaauuacuggauuuauu

SEQ ID NO: 534507 - RNA, 32 nt, Human
uuauucauagcauugugggucucuccaguaag

SEQ ID NO: 534508 - RNA, 32 nt, Human
uuauucauauccagcacucccugcggcugcug

SEQ ID NO: 534509 - RNA, 32 nt, Human
uuauucaucaccaggcuguaagcaauaucuug

SEQ ID NO: 534510 - RNA, 32 nt, Human
uuauucaucccucccucuccuuuaacccuuag

SEQ ID NO: 534511 - RNA, 31 nt, Human
uuauucaugcucucuggcugccuuuguagac

SEQ ID NO: 534512 - RNA, 32 nt, Human
uuauucaugucccagaagaccaaaaagugcuc

SEQ ID NO: 534513 - RNA, 32 nt, Human
uuauucauguuaucacugagcagcgggaacug

SEQ ID NO: 534514 - RNA, 32 nt, Human
uuauucauguuauuuucccugcccaagacuuu

SEQ ID NO: 534515 - RNA, 32 nt, Human
uuauucauuuagcuggcaacugccuuuauugc

SEQ ID NO: 534516 - RNA, 32 nt, Human
uuauuccaacacacccggcccagccuuaaccc

SEQ ID NO: 534517 - RNA, 32 nt, Human
uuauuccacagagucaagaccaauauucugcc

SEQ ID NO: 534518 - RNA, 32 nt, Human
uuauuccagagcugccaguggggccugaggcu

SEQ ID NO: 534519 - RNA, 32 nt, Human
uuauuccagagggaggcuuggaucagcaccug

SEQ ID NO: 534520 - RNA, 32 nt, Human
uuauuccagauggggaaacugaggcucaggug

SEQ ID NO: 534521 - RNA, 32 nt, Human
uuauuccagcuccuauguucuguguauaucau

SEQ ID NO: 534522 - RNA, 32 nt, Human
uuauuccaggaucaguagaaucacagaggguu

SEQ ID NO: 534523 - RNA, 32 nt, Human
uuauuccauccuguaauccuagcacuuuaaaa

SEQ ID NO: 534524 - RNA, 32 nt, Human
uuauucccaaggacagugcugacggggagggg

SEQ ID NO: 534525 - RNA, 32 nt, Human
uuauucccacagaauuuggugauguccuuauu

SEQ ID NO: 534526 - RNA, 23 nt, Human
uuauucccaggcuggagugcaau

SEQ ID NO: 534527 - RNA, 32 nt, Human
uuauucccagugaaaguggcucucagcaggaa

SEQ ID NO: 534528 - RNA, 32 nt, Human
uuauucccaucuuuacccccaagacuuuauug

SEQ ID NO: 534529 - RNA, 32 nt, Human
uuauucccaucuuuacucccaagacuucauug

SEQ ID NO: 534530 - RNA, 32 nt, Human
uuauuccccagcccugggaaauaggagcuguc

SEQ ID NO: 534531 - RNA, 32 nt, Human
uuauuccccagcugcccucuccagcucccucc

SEQ ID NO: 534532 - RNA, 32 nt, Human
uuauucccccucaaagaaaccccacuaguagu

SEQ ID NO: 534533 - RNA, 32 nt, Human
uuauucccugaggcucccuugacucaggacug

SEQ ID NO: 534534 - RNA, 32 nt, Human
uuauucccuuaggauagucucucagugccaag

SEQ ID NO: 534535 - RNA, 32 nt, Human
uuauucccuuuuucucuuccucacuuuauugc

SEQ ID NO: 534536 - RNA, 32 nt, Human
uuauuccgaucugacauaucugcauuauaaua

SEQ ID NO: 534537 - RNA, 32 nt, Human
uuauuccuaagaggagaaaaucaguaacggga

SEQ ID NO: 534538 - RNA, 32 nt, Human
uuauuccuaauucugccccuuuuaaccugaug

SEQ ID NO: 534539 - RNA, 32 nt, Human
uuauuccucauucuguggauguuucuaugagc

SEQ ID NO: 534540 - RNA, 32 nt, Human
uuauuccucccucaugagcacagggucggggg

SEQ ID NO: 534541 - RNA, 32 nt, Human
uuauuccuccuuugcugauccugggucacacu

SEQ ID NO: 534542 - RNA, 32 nt, Human
uuauuccucuugaaguuaguuugauuuuaucu

SEQ ID NO: 534543 - RNA, 32 nt, Human
uuauuccugccuguguugcccaccuguucaca

SEQ ID NO: 534544 - RNA, 32 nt, Human
uuauuccuggugucagggagauuaggaaacac

SEQ ID NO: 534545 - RNA, 32 nt, Human
uuauuccuguaaucccaacacuguggaaggcc

SEQ ID NO: 534546 - RNA, 32 nt, Human
uuauuccuuacucaugaacagugucggcgcac

SEQ ID NO: 534547 - RNA, 32 nt, Human
uuauucgagcauacuggcaaugcauuggaaaa

SEQ ID NO: 534548 - RNA, 32 nt, Human
uuauucgcuaguagcggcuacuuuaaaaugcu

SEQ ID NO: 534549 - RNA, 32 nt, Human
uuauucgucuucuccccauuccgcugccgccg

SEQ ID NO: 534550 - RNA, 20 nt, Human
uuauucuaacaauuacauga

SEQ ID NO: 534551 - RNA, 32 nt, Human
uuauucuacuccugcaaugaacccuguugaca

SEQ ID NO: 534552 - RNA, 32 nt, Human
uuauucuagaggucucucuggaaaagauggag

SEQ ID NO: 534553 - RNA, 32 nt, Human
uuauucuagccugucaugagucugucugagca

SEQ ID NO: 534554 - RNA, 32 nt, Human
uuauucuauauugcuuaccugaucucauguua

SEQ ID NO: 534555 - RNA, 32 nt, Human
uuauucuaucgguauaaaggcauugauauuuu

SEQ ID NO: 534556 - RNA, 32 nt, Human
uuauucucaaagcucaaucaagacacccagua

SEQ ID NO: 534557 - RNA, 32 nt, Human
uuauucucagcacccagaacagugccuggcac

SEQ ID NO: 534558 - RNA, 32 nt, Human
uuauucuccucuuccuuuuacccuagucucac

SEQ ID NO: 534559 - RNA, 32 nt, Human
uuauucucuccaaagcuggucuuucugacuau

SEQ ID NO: 534560 - RNA, 32 nt, Human
uuauucucuuccaggauuuguguuuuguucuu

SEQ ID NO: 534561 - RNA, 32 nt, Human
uuauucucuuucuucugaccuccuugccucuu

SEQ ID NO: 534562 - RNA, 32 nt, Human
uuauucucuuuuguaacugcugucuuuacaau

SEQ ID NO: 534563 - RNA, 32 nt, Human
uuauucugagucugacacagacccaugacaug

SEQ ID NO: 534564 - RNA, 32 nt, Human
uuauucugcuuccacuguguuggggagaggug

SEQ ID NO: 534565 - RNA, 32 nt, Human
uuauucuggagacaagaaaaucaucacucugg

SEQ ID NO: 534566 - RNA, 32 nt, Human
uuauucuguaucaucaccaguacuuuguacuu

SEQ ID NO: 534567 - RNA, 32 nt, Human
uuauucugugacuugcuggagguuggcagugg

SEQ ID NO: 534568 - RNA, 32 nt, Human
uuauucuguggaaagaaaaaccuguaaagugu

SEQ ID NO: 534569 - RNA, 32 nt, Human
uuauucuguguguagacauuguauuccacaau

SEQ ID NO: 534570 - RNA, 32 nt, Human
uuauucuuaaagucggcgagaccaacaaccca

SEQ ID NO: 534571 - RNA, 32 nt, Human
uuauucuucaaacuaucuaaacuagucaugga

SEQ ID NO: 534572 - RNA, 32 nt, Human
uuauucuucaacaacaguaacuaaucuuuaaa

SEQ ID NO: 534573 - RNA, 32 nt, Human
uuauucuucuuacuuaaucucagaccuugguc

SEQ ID NO: 534574 - RNA, 32 nt, Human
uuauucuugaaacugagguuuaccuggaucug

SEQ ID NO: 534575 - RNA, 32 nt, Human
uuauucuugcaucuuauuaauuuucuaugaua

SEQ ID NO: 534576 - RNA, 32 nt, Human
uuauucuuggugcugccugggguguugcugag

SEQ ID NO: 534577 - RNA, 32 nt, Human
uuauucuuugaccuucccacaagacaauaccc

SEQ ID NO: 534578 - RNA, 32 nt, Human
uuauucuuugccuuguucucugugaaguccuu

SEQ ID NO: 534579 - RNA, 32 nt, Human
uuauucuuugcuagccucucuuacuaauggaa

SEQ ID NO: 534580 - RNA, 32 nt, Human
uuauucuuugggccuugagcagguuaguaguc

SEQ ID NO: 534581 - RNA, 32 nt, Human
uuauugaaaagaggaggggaaaggucuauaaa

SEQ ID NO: 534582 - RNA, 32 nt, Human
uuauugaaaugaggcuguggauucaaggcucc

SEQ ID NO: 534583 - RNA, 32 nt, Human
uuauugaaggcccuguggacagcugggauagc

SEQ ID NO: 534584 - RNA, 32 nt, Human
uuauugacacuacaaguggcccacagggagcc

SEQ ID NO: 534585 - RNA, 32 nt, Human
uuauugacuacaagugcucacagacuagaacu

SEQ ID NO: 534586 - RNA, 32 nt, Human
uuauugagaaaagguuguaggaugugucacaa

SEQ ID NO: 534587 - RNA, 32 nt, Human
uuauugagaucuaagucugucuugccuucauu

SEQ ID NO: 534588 - RNA, 32 nt, Human
uuauugagcaaauguguuccuuucuucuaaaa

SEQ ID NO: 534589 - RNA, 32 nt, Human
uuauugagcaccuacuaugugccagccacugu

SEQ ID NO: 534590 - RNA, 32 nt, Human
uuauugagcaccuacuaugugcccagcccugu

SEQ ID NO: 534591 - RNA, 32 nt, Human
uuauugagugaaucauuaggacacaaaauagg

SEQ ID NO: 534592 - RNA, 32 nt, Human
uuauugagugccuguugcauacaggcacaauc

SEQ ID NO: 534593 - RNA, 32 nt, Human
uuauugagugggagacaggcggcaggugggag

SEQ ID NO: 534594 - RNA, 32 nt, Human
uuauugauaaaguuagggagaagauugaugca

SEQ ID NO: 534595 - RNA, 32 nt, Human
uuauugauacaacaggauuuucaaguuauuca

SEQ ID NO: 534596 - RNA, 32 nt, Human
uuauugauauggugagccccaucucucaguuu

SEQ ID NO: 534597 - RNA, 32 nt, Human
uuauugauuaacugcaacgagucaucucccug

SEQ ID NO: 534598 - RNA, 32 nt, Human
uuauugauuuuacuggcacuguauuuggaccu

SEQ ID NO: 534599 - RNA, 32 nt, Human
uuauugcaaccauauuggcaaucugaaacugg

SEQ ID NO: 534600 - RNA, 32 nt, Human
uuauugcaaugcggagguugagaggaggacuu

SEQ ID NO: 534601 - RNA, 32 nt, Human
uuauugcaccacugaacuccagccugggccac

SEQ ID NO: 534602 - RNA, 32 nt, Human
uuauugcacuacugcauuccagccugggugac

SEQ ID NO: 534603 - RNA, 32 nt, Human
uuauugcaugaagucccucucacucccucuac

SEQ ID NO: 534604 - RNA, 32 nt, Human
uuauugccacugagacagaaacagcagaaauc

SEQ ID NO: 534605 - RNA, 32 nt, Human
uuauugccaguggagacuggugagcugggccu

SEQ ID NO: 534606 - RNA, 32 nt, Human
uuauugcccaggcuagagugcaauggugcgau

SEQ ID NO: 534607 - RNA, 24 nt, Human
uuauugcccaggcuggagugcaau

SEQ ID NO: 534608 - RNA, 32 nt, Human
uuauugcccaggcuggagugcaauggcacgac

SEQ ID NO: 534609 - RNA, 32 nt, Human
uuauugcccaggcuggagugcaauggcacgau

SEQ ID NO: 534610 - RNA, 32 nt, Human
uuauugcccaggcuggagugcaauggugcaau

SEQ ID NO: 534611 - RNA, 23 nt, Human
uuauugcccaggcuggagugcag

SEQ ID NO: 534612 - RNA, 24 nt, Human
uuauugcccaggcuggagugcagu

SEQ ID NO: 534613 - RNA, 32 nt, Human
uuauugcccaggcuggagugcagugacgaggu

SEQ ID NO: 534614 - RNA, 32 nt, Human
uuauugcccaggcuggagugcaguggcacaau

SEQ ID NO: 534615 - RNA, 32 nt, Human
uuauugcccaggcuggagugcaguggcgugau

SEQ ID NO: 534616 - RNA, 32 nt, Human
uuauugcccaggcuggaguguaguggcgcaau

SEQ ID NO: 534617 - RNA, 22 nt, Human
uuauugcccaggcuugagugca

SEQ ID NO: 534618 - RNA, 24 nt, Human
uuauugcccaggcuugagugcaau

SEQ ID NO: 534619 - RNA, 32 nt, Human
uuauugcccaggcuugagugcaaugaccuguu

SEQ ID NO: 534620 - RNA, 22 nt, Human
uuauugccccaaccauugcaau

SEQ ID NO: 534621 - RNA, 32 nt, Human
uuauugcccuguccucaaacuggucauaggcu

SEQ ID NO: 534622 - RNA, 32 nt, Human
uuauugccucuaaaggccucagaagagcacac

SEQ ID NO: 534623 - RNA, 32 nt, Human
uuauugccuuuguuguuguauuacaaaucugc

SEQ ID NO: 534624 - RNA, 32 nt, Human
uuauugcgggauacuugugaaauauacauagg

SEQ ID NO: 534625 - RNA, 32 nt, Human
uuauugcgucuugcuccugggucacagagccu

SEQ ID NO: 534626 - RNA, 32 nt, Human
uuauugcuacuuccugccuggucuccugcccc

SEQ ID NO: 534627 - RNA, 32 nt, Human
uuauugcucacgucugugccauguugucaaug

SEQ ID NO: 534628 - RNA, 32 nt, Human
uuauugcucauuuguauaucuaucuaccauca

SEQ ID NO: 534629 - RNA, 32 nt, Human
uuauugcugcagaaaacaaaagccuggcugag

SEQ ID NO: 534630 - RNA, 32 nt, Human
uuauugcugcuuccagaccagagucccucccu

SEQ ID NO: 534631 - RNA, 32 nt, Human
uuauugcuggcucaaggaaaauucuuugaaau

SEQ ID NO: 534632 - RNA, 32 nt, Human
uuauugcuguggucuuucuacuccacaaaaua

SEQ ID NO: 534633 - RNA, 32 nt, Human
uuauugcuguuuucuuccuuccuuggauacuu

SEQ ID NO: 534634 - RNA, 32 nt, Human
uuauugcuuaaaacaugaagacugcuuucuuu

SEQ ID NO: 534635 - RNA, 32 nt, Human
uuauugcuucuucucccaucugcccguugaca

SEQ ID NO: 534636 - RNA, 32 nt, Human
uuauugcuuuugcccaugcauucaauauugau

SEQ ID NO: 534637 - RNA, 32 nt, Human
uuauuggaaagaggagacagaaugacaagaua

SEQ ID NO: 534638 - RNA, 31 nt, Human
uuauuggaacaauguacuacuugaguaauac

SEQ ID NO: 534639 - RNA, 32 nt, Human
uuauuggaagcauggauguuagugaaaguuac

SEQ ID NO: 534640 - RNA, 32 nt, Human
uuauuggaagcugauucccagagcagaccaca

SEQ ID NO: 534641 - RNA, 32 nt, Human
uuauuggagacaggguuucaccauguuggcca

SEQ ID NO: 534642 - RNA, 32 nt, Human
uuauuggaggaaguauugagugugugcucuca

SEQ ID NO: 534643 - RNA, 32 nt, Human
uuauuggaggaccuggcucaaggggcugcgcg

SEQ ID NO: 534644 - RNA, 32 nt, Human
uuauuggauaauagucuccugcucugacugga

SEQ ID NO: 534645 - RNA, 32 nt, Human
uuauuggcaacaaaaggaauuuucuauccaga

SEQ ID NO: 534646 - RNA, 32 nt, Human
uuauugggaggaaaggaggcagcugcagaauu

SEQ ID NO: 534647 - RNA, 32 nt, Human
uuauugggcaccuacuaugugccaggcacugu

SEQ ID NO: 534648 - RNA, 32 nt, Human
uuauuggguagucgauuggagacuuugauuuu

SEQ ID NO: 534649 - RNA, 32 nt, Human
uuauuggugaugacacguuucuuaaguaggag

SEQ ID NO: 534650 - RNA, 32 nt, Human
uuauugguggagggcuguuuuaacaucuuuga

SEQ ID NO: 534651 - RNA, 32 nt, Human
uuauugguggcuguuccugaaggaggcccugc

SEQ ID NO: 534652 - RNA, 32 nt, Human
uuauuguacacauuuaacacacaguagcaaau

SEQ ID NO: 534653 - RNA, 32 nt, Human
uuauuguagucauccuggaauaucuccgucaa

SEQ ID NO: 534654 - RNA, 32 nt, Human
uuauuguaugcccggaguuugcaugagauuuu

SEQ ID NO: 534655 - RNA, 32 nt, Human
uuauuguauguacaaauagagaauggaagaac

SEQ ID NO: 534656 - RNA, 32 nt, Human
uuauuguccauugagccuguacucugcuuucc

SEQ ID NO: 534657 - RNA, 32 nt, Human
uuauugucguacuuggacccagaaggggaaau

SEQ ID NO: 534658 - RNA, 32 nt, Human
uuauugucuacuugaguuacuacuuucuaaaa

SEQ ID NO: 534659 - RNA, 32 nt, Human
uuauugucuaucuccccacucccagaauguaa

SEQ ID NO: 534660 - RNA, 32 nt, Human
uuauugugaaaguugugcuguuuucuaaguaa

SEQ ID NO: 534661 - RNA, 31 nt, Human
uuauugugacuucuccagcccuggucugaau

SEQ ID NO: 534662 - RNA, 32 nt, Human
uuauugugcagcagauccagagacagaggcag

SEQ ID NO: 534663 - RNA, 32 nt, Human
uuauugugcgcccgaacuuuucacacaagaau

SEQ ID NO: 534664 - RNA, 32 nt, Human
uuauugugcuccauugcaacuuuaugguucaa

SEQ ID NO: 534665 - RNA, 32 nt, Human
uuauugugcugugucugguccuaaguggagcc

SEQ ID NO: 534666 - RNA, 32 nt, Human
uuauugugguuaggaagcaauuucccaaugua

SEQ ID NO: 534667 - RNA, 32 nt, Human
uuauugugucugcagugcugaaaacagugcuc

SEQ ID NO: 534668 - RNA, 32 nt, Human
uuauuguguuuuuaugcuguuuuauacuuuuu

SEQ ID NO: 534669 - RNA, 32 nt, Human
uuauuguuaucauccauaggcauuggaaggaa

SEQ ID NO: 534670 - RNA, 32 nt, Human
uuauuguuuccucagaaugagggcaguaacuu

SEQ ID NO: 534671 - RNA, 32 nt, Human
uuauuuaaaacaguuuuacaagcacggccuac

SEQ ID NO: 534672 - RNA, 32 nt, Human
uuauuuaaaauggaacuaaagauagaaggagg

SEQ ID NO: 534673 - RNA, 32 nt, Human
uuauuuaaagagacaguacacucugaaagaac

SEQ ID NO: 534674 - RNA, 32 nt, Human
uuauuuaacaucuuuaauagcacagcaaacau

SEQ ID NO: 534675 - RNA, 32 nt, Human
uuauuuaaccauuguucuauuuggcauaaccc

SEQ ID NO: 534676 - RNA, 32 nt, Human
uuauuuaacucaugggagccucaguuuccuca

SEQ ID NO: 534677 - RNA, 32 nt, Human
uuauuuaacuuauuucaagggugcugugcuca

SEQ ID NO: 534678 - RNA, 32 nt, Human
uuauuuaagaagcaaaacacagcaccuuuacc

SEQ ID NO: 534679 - RNA, 32 nt, Human
uuauuuaagacugaauuagaacugagucauuc

SEQ ID NO: 534680 - RNA, 32 nt, Human
uuauuuaagcuacugccaucaaccccaccccc

SEQ ID NO: 534681 - RNA, 32 nt, Human
uuauuuaaguucaagagaaaaaguguacacac

SEQ ID NO: 534682 - RNA, 32 nt, Human
uuauuuacaaacaugucuacaaaaauagauua

SEQ ID NO: 534683 - RNA, 32 nt, Human
uuauuuacaaaugaccccaaaguauaagagua

SEQ ID NO: 534684 - RNA, 32 nt, Human
uuauuuacacucauuuuuaucuuggcugacag

SEQ ID NO: 534685 - RNA, 32 nt, Human
uuauuuacagccgcucccaggccuucucggaa

SEQ ID NO: 534686 - RNA, 32 nt, Human
uuauuuacaucuuuaucagguauccuccaguc

SEQ ID NO: 534687 - RNA, 32 nt, Human
uuauuuacaugccaccaaccaaccucagaaac

SEQ ID NO: 534688 - RNA, 32 nt, Human
uuauuuacaugccacuauuaagcugcuaauug

SEQ ID NO: 534689 - RNA, 32 nt, Human
uuauuuacauuacauacauacauuuacaacau

SEQ ID NO: 534690 - RNA, 32 nt, Human
uuauuuaccaaguaccaacaguagaaguaaca

SEQ ID NO: 534691 - RNA, 32 nt, Human
uuauuuaccaggcugugcgguggcaccagaca

SEQ ID NO: 534692 - RNA, 32 nt, Human
uuauuuacccuuuggcaucuuuauauuuguua

SEQ ID NO: 534693 - RNA, 32 nt, Human
uuauuuacugguuuguggccuuuuacugugcu

SEQ ID NO: 534694 - RNA, 32 nt, Human
uuauuuagcacaaaccaagcacaaaaguccuc

SEQ ID NO: 534695 - RNA, 32 nt, Human
uuauuuagccuucuuuaauuuuucucaccaau

SEQ ID NO: 534696 - RNA, 32 nt, Human
uuauuuagcgcugugugugugcucuuauuucc

SEQ ID NO: 534697 - RNA, 32 nt, Human
uuauuuagguauaaauggucaucuuauuauuu

SEQ ID NO: 534698 - RNA, 32 nt, Human
uuauuuaguaagauggagucucgcucuguugc

SEQ ID NO: 534699 - RNA, 32 nt, Human
uuauuuaguuauucuggguauuuccuauguaa

SEQ ID NO: 534700 - RNA, 32 nt, Human
uuauuuauauccuaaucuuggagcucagaaag

SEQ ID NO: 534701 - RNA, 32 nt, Human
uuauuuaucuuucuggguauuuuuauagcccu

SEQ ID NO: 534702 - RNA, 32 nt, Human
uuauuuaugauacugauuaguauaaaaacgua

SEQ ID NO: 534703 - RNA, 32 nt, Human
uuauuuauggccaguuuuggggccaguuuaug

SEQ ID NO: 534704 - RNA, 32 nt, Human
uuauuuaugucuguuuacgguugaggaauuca

SEQ ID NO: 534705 - RNA, 32 nt, Human
uuauuuauuacaguuacauuggagauuucauc

SEQ ID NO: 534706 - RNA, 31 nt, Human
uuauuuauucuccgagagguuggagacgucc

SEQ ID NO: 534707 - RNA, 32 nt, Human
uuauuuauuuauuuucuuguugccucaaaaga

SEQ ID NO: 534708 - RNA, 32 nt, Human
uuauuuauuugccguuuuaauuuauggauucu

SEQ ID NO: 534709 - RNA, 32 nt, Human
uuauuuauuuuuagguacauuaggcaagagac

SEQ ID NO: 534710 - RNA, 32 nt, Human
uuauuucaaaacugagaaauucaugggaauga

SEQ ID NO: 534711 - RNA, 32 nt, Human
uuauuucaaauuuggacauggcuagucgaggc

SEQ ID NO: 534712 - RNA, 32 nt, Human
uuauuucaaguuggacagaucuuggagauaau

SEQ ID NO: 534713 - RNA, 32 nt, Human
uuauuucaaucagcucugacacuuguuuagac

SEQ ID NO: 534714 - RNA, 32 nt, Human
uuauuucaauugacaauucugccuccucuuuu

SEQ ID NO: 534715 - RNA, 32 nt, Human
uuauuucacaccaguuccuccuuguuucaucu

SEQ ID NO: 534716 - RNA, 32 nt, Human
uuauuucacauauuaacucaugggccagugag

SEQ ID NO: 534717 - RNA, 32 nt, Human
uuauuucacugaagcugagauuauuagugaua

SEQ ID NO: 534718 - RNA, 32 nt, Human
uuauuucagauagcaaaagacaagccaaugaa

SEQ ID NO: 534719 - RNA, 32 nt, Human
uuauuucagaugauucaaauaucaaaaggaag

SEQ ID NO: 534720 - RNA, 28 nt, Human
uuauuucagguucaugccucauuacaca

SEQ ID NO: 534721 - RNA, 32 nt, Human
uuauuucagugaacugcuggaacucacacaug

SEQ ID NO: 534722 - RNA, 32 nt, Human
uuauuucaucaccaagauauuaagccuaguac

SEQ ID NO: 534723 - RNA, 32 nt, Human
uuauuuccacugcacgcuggugcugggagcgc

SEQ ID NO: 534724 - RNA, 32 nt, Human
uuauuuccagacagcuccuacucuuauggugg

SEQ ID NO: 534725 - RNA, 32 nt, Human
uuauuuccaggcauuuugggaaaaagaugcug

SEQ ID NO: 534726 - RNA, 32 nt, Human
uuauuuccauguucuaagaagguguugguacu

SEQ ID NO: 534727 - RNA, 32 nt, Human
uuauuucccaacacucccucuucccagauucu

SEQ ID NO: 534728 - RNA, 32 nt, Human
uuauuucccuggcaggcagccuugccagaagg

SEQ ID NO: 534729 - RNA, 32 nt, Human
uuauuucccuuggcauaaggucuuccaguuuu

SEQ ID NO: 534730 - RNA, 32 nt, Human
uuauuucccuuggcauaaugucuuccaguucu

SEQ ID NO: 534731 - RNA, 32 nt, Human
uuauuucccuuggcauaaugucuuccaguuuu

SEQ ID NO: 534732 - RNA, 32 nt, Human
uuauuuccuaccuuugcaucccuuccucauaa

SEQ ID NO: 534733 - RNA, 32 nt, Human
uuauuuccuuaaauguuuugccagccacuuac

SEQ ID NO: 534734 - RNA, 32 nt, Human
uuauuuccuucucuuuuaguaugagaaguggc

SEQ ID NO: 534735 - RNA, 32 nt, Human
uuauuuccuuuaggguacuguccuggucaaaa

SEQ ID NO: 534736 - RNA, 32 nt, Human
uuauuuccuuucccagagcaaaaguuuuuaau

SEQ ID NO: 534737 - RNA, 32 nt, Human
uuauuucuacccugucucuccccgccaccccc

SEQ ID NO: 534738 - RNA, 32 nt, Human
uuauuucuacuuuacaauuucucucuaaagca

SEQ ID NO: 534739 - RNA, 32 nt, Human
uuauuucuagaaaagcagcccagagucaguca

SEQ ID NO: 534740 - RNA, 32 nt, Human
uuauuucucagggagaucacagcaaccuaaau

SEQ ID NO: 534741 - RNA, 32 nt, Human
uuauuucucaucccucacccccucccaccuug

SEQ ID NO: 534742 - RNA, 31 nt, Human
uuauuucuccucucugagccucaguuucccu

SEQ ID NO: 534743 - RNA, 32 nt, Human
uuauuucuccugugucaguaguacaguguacg

SEQ ID NO: 534744 - RNA, 32 nt, Human
uuauuucuccuuggauacagauauauuuugua

SEQ ID NO: 534745 - RNA, 32 nt, Human
uuauuucugaaugauuuuuaggguaaauaaua

SEQ ID NO: 534746 - RNA, 32 nt, Human
uuauuucugagauguugaugugaacuguacau

SEQ ID NO: 534747 - RNA, 32 nt, Human
uuauuucuggugaggaaugaaagggccaagug

SEQ ID NO: 534748 - RNA, 32 nt, Human
uuauuucuggugcacuccucuccugagagugu

SEQ ID NO: 534749 - RNA, 32 nt, Human
uuauuucuuaaaauuucagaauagauauucac

SEQ ID NO: 534750 - RNA, 32 nt, Human
uuauuucuucagcuucauguaacccugacuga

SEQ ID NO: 534751 - RNA, 32 nt, Human
uuauuucuuugugauaacaaagagucuugguu

SEQ ID NO: 534752 - RNA, 32 nt, Human
uuauuugaaaccaguauuucauacaaacuugu

SEQ ID NO: 534753 - RNA, 32 nt, Human
uuauuugaaauguuaaugcucuuuagaaaaau

SEQ ID NO: 534754 - RNA, 32 nt, Human
uuauuugaagaaaagcauauugccaaaaauuc

SEQ ID NO: 534755 - RNA, 32 nt, Human
uuauuugaagaaugccugugaagccaggugug

SEQ ID NO: 534756 - RNA, 32 nt, Human
uuauuugaagcuugaaaaaugagcaggcggaa

SEQ ID NO: 534757 - RNA, 32 nt, Human
uuauuugaauacaggcauacaccauguaauaa

SEQ ID NO: 534758 - RNA, 32 nt, Human
uuauuugacaaaccaucaguguccacuauuug

SEQ ID NO: 534759 - RNA, 21 nt, Human
uuauuugaccucccacuaccc

SEQ ID NO: 534760 - RNA, 32 nt, Human
uuauuugacuuugcuuucuuugcuuauuugac

SEQ ID NO: 534761 - RNA, 32 nt, Human
uuauuugagaauuuuguuucaaagggauugcu

SEQ ID NO: 534762 - RNA, 32 nt, Human
uuauuugagauggaaucuugcuuugucagcca

SEQ ID NO: 534763 - RNA, 32 nt, Human
uuauuugagauggagucucacucugucaccca

SEQ ID NO: 534764 - RNA, 32 nt, Human
uuauuugagcuauuuaaacaacuuaaacaucu

SEQ ID NO: 534765 - RNA, 32 nt, Human
uuauuugaggagacgaagugaaaacaaaucua

SEQ ID NO: 534766 - RNA, 32 nt, Human
uuauuugaggcagucagucauugauuugcaaa

SEQ ID NO: 534767 - RNA, 32 nt, Human
uuauuugauuaaaauuauuucccacugaccua

SEQ ID NO: 534768 - RNA, 32 nt, Human
uuauuugcaaugagagagaugguuggccccga

SEQ ID NO: 534769 - RNA, 32 nt, Human
uuauuugccauauaucauccugggcuuacauu

SEQ ID NO: 534770 - RNA, 32 nt, Human
uuauuugccuccauggccuuugaacuugcaca

SEQ ID NO: 534771 - RNA, 32 nt, Human
uuauuugccuggcaagaaaaguuuauuucaca

SEQ ID NO: 534772 - RNA, 32 nt, Human
uuauuugcuacuuggagggguuguaagaaaag

SEQ ID NO: 534773 - RNA, 32 nt, Human
uuauuugcuccuucucuucaugccuguggcug

SEQ ID NO: 534774 - RNA, 32 nt, Human
uuauuugcuuauugccugucucccucuaucag

SEQ ID NO: 534775 - RNA, 32 nt, Human
uuauuugcuucaaaaggagaucuuuagaaaaa

SEQ ID NO: 534776 - RNA, 32 nt, Human
uuauuuggaaggaagcaggggcuguccacccu

SEQ ID NO: 534777 - RNA, 32 nt, Human
uuauuuggagugaccccagaggacaagacuac

SEQ ID NO: 534778 - RNA, 32 nt, Human
uuauuuggagugagaaaucaaggagacagagc

SEQ ID NO: 534779 - RNA, 32 nt, Human
uuauuuggcaggugccaaauauacggguuauc

SEQ ID NO: 534780 - RNA, 32 nt, Human
uuauuugggacuugagauuugcagugauacca

SEQ ID NO: 534781 - RNA, 32 nt, Human
uuauuugguacucuagggcugaaggaaaguac

SEQ ID NO: 534782 - RNA, 32 nt, Human
uuauuuggucuccuauguagcauuucagaaaa

SEQ ID NO: 534783 - RNA, 32 nt, Human
uuauuuguaaguaggcuggauaaauggugcuu

SEQ ID NO: 534784 - RNA, 32 nt, Human
uuauuuguacucuguguggcuuuuguuuuaga

SEQ ID NO: 534785 - RNA, 32 nt, Human
uuauuuguagcugccaggcuuucuguaaaaau

SEQ ID NO: 534786 - RNA, 32 nt, Human
uuauuuguagguccagaggucucccugagaag

SEQ ID NO: 534787 - RNA, 32 nt, Human
uuauuuguauagccacauaguauuccauuaua

SEQ ID NO: 534788 - RNA, 32 nt, Human
uuauuugucucacacagccauauaguuuuucc

SEQ ID NO: 534789 - RNA, 32 nt, Human
uuauuugugcccagaagcaguuauguaugcuu

SEQ ID NO: 534790 - RNA, 32 nt, Human
uuauuugugcuauucacucccuucccuuugga

SEQ ID NO: 534791 - RNA, 32 nt, Human
uuauuuguggaauuguugcacaugcuccucua

SEQ ID NO: 534792 - RNA, 32 nt, Human
uuauuuguggcagaaggugaucagauaagcuc

SEQ ID NO: 534793 - RNA, 32 nt, Human
uuauuuguuuuuaaguuaggaugcuuuuuaac

SEQ ID NO: 534794 - RNA, 32 nt, Human
uuauuuuaaagaaagaccagaagaguggacaa

SEQ ID NO: 534795 - RNA, 32 nt, Human
uuauuuuaaagugcaagcacaaaauccucaug

SEQ ID NO: 534796 - RNA, 32 nt, Human
uuauuuuaagauccugccauguuuuuaaucac

SEQ ID NO: 534797 - RNA, 32 nt, Human
uuauuuuaauuuuuaauuugaggggaaaagaa

SEQ ID NO: 534798 - RNA, 32 nt, Human
uuauuuuacaaggauguuggcaaacgaaccua

SEQ ID NO: 534799 - RNA, 32 nt, Human
uuauuuuacaguuccagggauugugaaauaaa

SEQ ID NO: 534800 - RNA, 32 nt, Human
uuauuuuacaucuuccaguuuguccaucccau

SEQ ID NO: 534801 - RNA, 32 nt, Human
uuauuuuacugaggaugaucgaagaacuggcu

SEQ ID NO: 534802 - RNA, 32 nt, Human
uuauuuuauaaauacuuuguuuacauuuuaga

SEQ ID NO: 534803 - RNA, 32 nt, Human
uuauuuuauuugccuccagucuggcuaggaaa

SEQ ID NO: 534804 - RNA, 32 nt, Human
uuauuuuauuuuuguagagacaggguuuugcu

SEQ ID NO: 534805 - RNA, 32 nt, Human
uuauuuucaagcaaauauuuaugaccucaaca

SEQ ID NO: 534806 - RNA, 32 nt, Human
uuauuuucaaguagcugggauuuuaaacuaga

SEQ ID NO: 534807 - RNA, 32 nt, Human
uuauuuucaauacuucuuuaaauuuaaaauaa

SEQ ID NO: 534808 - RNA, 32 nt, Human
uuauuuucacugcacacaagacuguauuauga

SEQ ID NO: 534809 - RNA, 32 nt, Human
uuauuuucaugccucccugcuccuaguaaugu

SEQ ID NO: 534810 - RNA, 32 nt, Human
uuauuuucauguuguuauguaaucaauauuuu

SEQ ID NO: 534811 - RNA, 32 nt, Human
uuauuuucauuccguccccuugguacuuugcc

SEQ ID NO: 534812 - RNA, 32 nt, Human
uuauuuucauucuuuauccaugagcaccaggc

SEQ ID NO: 534813 - RNA, 32 nt, Human
uuauuuucccugcaacaucuccaccucccaau

SEQ ID NO: 534814 - RNA, 32 nt, Human
uuauuuuccuauuuuuauuaaauuuggaacca

SEQ ID NO: 534815 - RNA, 32 nt, Human
uuauuuuccuccuccuccuucuucuucuccuu

SEQ ID NO: 534816 - RNA, 32 nt, Human
uuauuuuccuccuccuccuuggccuacucaac

SEQ ID NO: 534817 - RNA, 32 nt, Human
uuauuuuccugaauaagaaccaggaagaaacu

SEQ ID NO: 534818 - RNA, 32 nt, Human
uuauuuuccuuucuaccuucagaaguggcuaa

SEQ ID NO: 534819 - RNA, 32 nt, Human
uuauuuuccuuucuaccuucagaaguggcuau

SEQ ID NO: 534820 - RNA, 32 nt, Human
uuauuuucuaagaucuaccugaacuuagagac

SEQ ID NO: 534821 - RNA, 32 nt, Human
uuauuuucuauuuucuucuguuuccuuuggaa

SEQ ID NO: 534822 - RNA, 32 nt, Human
uuauuuucuccaaauaaaaauuagauggaaaa

SEQ ID NO: 534823 - RNA, 32 nt, Human
uuauuuucucuccuuucagaguuuacauuuuu

SEQ ID NO: 534824 - RNA, 32 nt, Human
uuauuuucuuaaaaucaguagcuauuuggccu

SEQ ID NO: 534825 - RNA, 32 nt, Human
uuauuuucuuccccuaccucucuuccuucuuc

SEQ ID NO: 534826 - RNA, 32 nt, Human
uuauuuucuuucgucugcauguucacaauacc

SEQ ID NO: 534827 - RNA, 32 nt, Human
uuauuuucuuuuucuuucuucauaaagaugag

SEQ ID NO: 534828 - RNA, 32 nt, Human
uuauuuugaacuacuuaccaaaauuagaaguu

SEQ ID NO: 534829 - RNA, 32 nt, Human
uuauuuugaaucccuucuauuuuacuuguaca

SEQ ID NO: 534830 - RNA, 32 nt, Human
uuauuuugaauugcuccaucuccuggugggac

SEQ ID NO: 534831 - RNA, 32 nt, Human
uuauuuugagcucagccccaacucuuuaucaa

SEQ ID NO: 534832 - RNA, 32 nt, Human
uuauuuugaggcagacagagagcuguuauccu

SEQ ID NO: 534833 - RNA, 32 nt, Human
uuauuuugauaguagcuuccuccucugguggu

SEQ ID NO: 534834 - RNA, 32 nt, Human
uuauuuugcauuuaccccaauuuccuuauuug

SEQ ID NO: 534835 - RNA, 32 nt, Human
uuauuuugccauguuuugcaaggcuugguaua

SEQ ID NO: 534836 - RNA, 32 nt, Human
uuauuuugccugaaauuggcuuaaagaaaguc

SEQ ID NO: 534837 - RNA, 32 nt, Human
uuauuuugcuaccucuuugaaaaccugcaugc

SEQ ID NO: 534838 - RNA, 32 nt, Human
uuauuuuggagaagagugaauuuucagcccuc

SEQ ID NO: 534839 - RNA, 32 nt, Human
uuauuuuggauacauuuugaaaagggauagca

SEQ ID NO: 534840 - RNA, 32 nt, Human
uuauuuugucuuuugcaccaguuucuggaggc

SEQ ID NO: 534841 - RNA, 32 nt, Human
uuauuuuguucuguucugucaugugccacaaa

SEQ ID NO: 534842 - RNA, 32 nt, Human
uuauuuuguugauggaauacuguaucauaugc

SEQ ID NO: 534843 - RNA, 32 nt, Human
uuauuuuuaaacauguuagaacuuaccaaaau

SEQ ID NO: 534844 - RNA, 32 nt, Human
uuauuuuuaauaagccucuuccuacuagaaca

SEQ ID NO: 534845 - RNA, 32 nt, Human
uuauuuuuacagugaagacuguuuucagcucu

SEQ ID NO: 534846 - RNA, 32 nt, Human
uuauuuuuacuuuugugaccacuauuuuagaa

SEQ ID NO: 534847 - RNA, 32 nt, Human
uuauuuuuagagaugaggucucacuauguugc

SEQ ID NO: 534848 - RNA, 32 nt, Human
uuauuuuuaggauucaaacagaaagaaaugac

SEQ ID NO: 534849 - RNA, 32 nt, Human
uuauuuuuagggggaaauuuguuuucuuuaug

SEQ ID NO: 534850 - RNA, 32 nt, Human
uuauuuuucaaaugucaccaauaaaaguuuug

SEQ ID NO: 534851 - RNA, 32 nt, Human
uuauuuuucaaggaccucuagacuacagacca

SEQ ID NO: 534852 - RNA, 32 nt, Human
uuauuuuucagaauuugcacauggaacacuua

SEQ ID NO: 534853 - RNA, 32 nt, Human
uuauuuuuccaaguguuuagguaauaauguau

SEQ ID NO: 534854 - RNA, 32 nt, Human
uuauuuuucccuuuucagaaaguccuuagugc

SEQ ID NO: 534855 - RNA, 32 nt, Human
uuauuuuucgagacggagucucgcucugucgc

SEQ ID NO: 534856 - RNA, 32 nt, Human
uuauuuuucucaaaauuuagugaaaaucccuc

SEQ ID NO: 534857 - RNA, 32 nt, Human
uuauuuuucuuuccuuuucucuucuuuauuuu

SEQ ID NO: 534858 - RNA, 32 nt, Human
uuauuuuugcacuucgucaugacaguauagag

SEQ ID NO: 534859 - RNA, 32 nt, Human
uuauuuuugcauaugaaagaggccagaaccca

SEQ ID NO: 534860 - RNA, 22 nt, Human
uuauuuuugcccccaccacccu

SEQ ID NO: 534861 - RNA, 32 nt, Human
uuauuuuugcuagauuuuguauaauguaacaa

SEQ ID NO: 534862 - RNA, 32 nt, Human
uuauuuuugcucucugggaaaauaacaugggc

SEQ ID NO: 534863 - RNA, 32 nt, Human
uuauuuuugcugucuucucuuggcuuauuuuu

SEQ ID NO: 534864 - RNA, 32 nt, Human
uuauuuuuggaauugaaauacuugcuuaaacc

SEQ ID NO: 534865 - RNA, 32 nt, Human
uuauuuuuguaaaugauucugugcccaggagc

SEQ ID NO: 534866 - RNA, 32 nt, Human
uuauuuuugucaaacauguacuccuuucauac

SEQ ID NO: 534867 - RNA, 32 nt, Human
uuauuuuugucuuuccagccagccugcuggcu

SEQ ID NO: 534868 - RNA, 32 nt, Human
uuauuuuuguggcaggcaucugugggaucugu

SEQ ID NO: 534869 - RNA, 25 nt, Human
uucaaaaaaugaaaaaguuuugccu

SEQ ID NO: 534870 - RNA, 32 nt, Human
uucaaaaacaaacaugguaaaaacagccccag

SEQ ID NO: 534871 - RNA, 32 nt, Human
uucaaaaacuccugaaguuuugcuuccccuuc

SEQ ID NO: 534872 - RNA, 32 nt, Human
uucaaaaagcuauucuggggcccuggcccccu

SEQ ID NO: 534873 - RNA, 25 nt, Human
uucaaaaagugaagccacuuuauaa

SEQ ID NO: 534874 - RNA, 32 nt, Human
uucaaaaagugaauuaugucaccauuugcaug

SEQ ID NO: 534875 - RNA, 22 nt, Human
uucaaaaauaaauuugcacugu

SEQ ID NO: 534876 - RNA, 21 nt, Human
uucaaaaaugcucugcacugu

SEQ ID NO: 534877 - RNA, 32 nt, Human
uucaaaacauuggcaguaguuguugaaaaaga

SEQ ID NO: 534878 - RNA, 32 nt, Human
uucaaaaccaaccuggucuacauggugaaacc

SEQ ID NO: 534879 - RNA, 32 nt, Human
uucaaaaccagccugaccaacauggugaaacc

SEQ ID NO: 534880 - RNA, 32 nt, Human
uucaaaaccagccugaccaauauggugaaacc

SEQ ID NO: 534881 - RNA, 24 nt, Human
uucaaaaccagccuggacaacaug

SEQ ID NO: 534882 - RNA, 32 nt, Human
uucaaaaccagccuggacaaucuggcgaaacc

SEQ ID NO: 534883 - RNA, 24 nt, Human
uucaaaaccagccuggccaacaua

SEQ ID NO: 534884 - RNA, 32 nt, Human
uucaaaaccagccuggccaacauagugaaacc

SEQ ID NO: 534885 - RNA, 24 nt, Human
uucaaaaccagccuggccaacaug

SEQ ID NO: 534886 - RNA, 32 nt, Human
uucaaaaccagccuggccaacaugcaaaaccc

SEQ ID NO: 534887 - RNA, 32 nt, Human
uucaaaaccagccuggccaacaugcugaaacc

SEQ ID NO: 534888 - RNA, 32 nt, Human
uucaaaaccagccuggccaacauggugaaacc

SEQ ID NO: 534889 - RNA, 24 nt, Human
uucaaaaccagccugggcaacaua

SEQ ID NO: 534890 - RNA, 32 nt, Human
uucaaaaccagccugggcaacauagcaagacc

SEQ ID NO: 534891 - RNA, 32 nt, Human
uucaaaaccagccugggcaauauagugagacc

SEQ ID NO: 534892 - RNA, 27 nt, Human
uucaaaaccagccuguccaauauagug

SEQ ID NO: 534893 - RNA, 24 nt, Human
uucaaaaccagcuugggcagcaug

SEQ ID NO: 534894 - RNA, 24 nt, Human
uucaaaaccaggcugggcaacaua

SEQ ID NO: 534895 - RNA, 22 nt, Human
uucaaaacgcagguguuucugg

SEQ ID NO: 534896 - RNA, 32 nt, Human
uucaaaacucagaugcauaaaacguaagguau

SEQ ID NO: 534897 - RNA, 32 nt, Human
uucaaaacucugucaagaacuccgucugcuug

SEQ ID NO: 534898 - RNA, 19 nt, Human
uucaaaagaaaacauaaga

SEQ ID NO: 534899 - RNA, 32 nt, Human
uucaaaagaaaauguuuauuuguucucauuaa

SEQ ID NO: 534900 - RNA, 32 nt, Human
uucaaaagaacagcaagcucugcaguaaaccu

SEQ ID NO: 534901 - RNA, 32 nt, Human
uucaaaagaaccacacuagggucuccaccuac

SEQ ID NO: 534902 - RNA, 32 nt, Human
uucaaaagacaggcaagcucacuacuagaaca

SEQ ID NO: 534903 - RNA, 32 nt, Human
uucaaaagcacuuugugcuguguucuauauaa

SEQ ID NO: 534904 - RNA, 21 nt, Human
uucaaaagcuaaucugccugu

SEQ ID NO: 534905 - RNA, 32 nt, Human
uucaaaaggagaggagaaaggaaaugagaaug

SEQ ID NO: 534906 - RNA, 32 nt, Human
uucaaaaggauggggaagugcgaucuuggcau

SEQ ID NO: 534907 - RNA, 32 nt, Human
uucaaaagggagcaaugcugugaaugcagcuu

SEQ ID NO: 534908 - RNA, 32 nt, Human
uucaaaagguguagaccuccugacugaagcau

SEQ ID NO: 534909 - RNA, 32 nt, Human
uucaaaaguaguucagcuuucauaaguagaac

SEQ ID NO: 534910 - RNA, 32 nt, Human
uucaaaagucucugugcaguggaagcaaaacu

SEQ ID NO: 534911 - RNA, 32 nt, Human
uucaaaagugaaggaaggaggccaggcgccgu

SEQ ID NO: 534912 - RNA, 22 nt, Human
uucaaaauaaguguauaaaaug

SEQ ID NO: 534913 - RNA, 32 nt, Human
uucaaaauauaaauuuguuuugauucuuuaua

SEQ ID NO: 534914 - RNA, 32 nt, Human
uucaaaaucaacaacagauugucucucggcuc

SEQ ID NO: 534915 - RNA, 32 nt, Human
uucaaaaucagccuggccaaaaugcugaaacu

SEQ ID NO: 534916 - RNA, 32 nt, Human
uucaaaaucagccugggguauauagcgagacg

SEQ ID NO: 534917 - RNA, 32 nt, Human
uucaaaaugaagauacacauuacagccaggug

SEQ ID NO: 534918 - RNA, 20 nt, Human
uucaaaaugcagcaaacuuu

SEQ ID NO: 534919 - RNA, 32 nt, Human
uucaaaauguuaggcugggggccguggccagc

SEQ ID NO: 534920 - RNA, 32 nt, Human
uucaaaauuagccuggugugguggcgcaugcc

SEQ ID NO: 534921 - RNA, 32 nt, Human
uucaaacaaaggaggaggagucauagggaaga

SEQ ID NO: 534922 - RNA, 22 nt, Human
uucaaacaauucuccugccuca

SEQ ID NO: 534923 - RNA, 32 nt, Human
uucaaacacagaaugccaagcuucagguugaa

SEQ ID NO: 534924 - RNA, 32 nt, Human
uucaaacauaugcauuauaugucaaaguaugc

SEQ ID NO: 534925 - RNA, 32 nt, Human
uucaaacaugaaggagaaauaaacuuucccag

SEQ ID NO: 534926 - RNA, 32 nt, Human
uucaaacaugccauaaggaaaacgagugccug

SEQ ID NO: 534927 - RNA, 32 nt, Human
uucaaaccagacgggccaacauggugaaaccc

SEQ ID NO: 534928 - RNA, 32 nt, Human
uucaaacccaacugugcugcuaacccacccug

SEQ ID NO: 534929 - RNA, 32 nt, Human
uucaaacccacugcuggcacaucccuuuccuu

SEQ ID NO: 534930 - RNA, 32 nt, Human
uucaaaccucacaagaugaaacucagaagaga

SEQ ID NO: 534931 - RNA, 32 nt, Human
uucaaaccuggugcauucaucccuggagcgcc

SEQ ID NO: 534932 - RNA, 32 nt, Human
uucaaacgagggucccgaaccccggggcggca

SEQ ID NO: 534933 - RNA, 22 nt, Human
uucaaacgcauccauggaguca

SEQ ID NO: 534934 - RNA, 31 nt, Human
uucaaacguuacuucaucugccaaagcauua

SEQ ID NO: 534935 - RNA, 32 nt, Human
uucaaacuauugcccauguuccccagggucag

SEQ ID NO: 534936 - RNA, 32 nt, Human
uucaaacucuaagaguacagagguuaguaaga

SEQ ID NO: 534937 - RNA, 32 nt, Human
uucaaacugagguggaaugcagugguucccau

SEQ ID NO: 534938 - RNA, 19 nt, Human
uucaaacugaguaaauugg

SEQ ID NO: 534939 - RNA, 32 nt, Human
uucaaacugccuauauugauaaaaccauacag

SEQ ID NO: 534940 - RNA, 21 nt, Human
uucaaacugcuaaauuaggua

SEQ ID NO: 534941 - RNA, 32 nt, Human
uucaaacuuccguaauggaguuagcccacagu

SEQ ID NO: 534942 - RNA, 32 nt, Human
uucaaacuugcucugcagcuaaggaaggugag

SEQ ID NO: 534943 - RNA, 32 nt, Human
uucaaagaaacaauguguauugaaguaccuag

SEQ ID NO: 534944 - RNA, 32 nt, Human
uucaaagaaauagguucacaacaggaauauac

SEQ ID NO: 534945 - RNA, 32 nt, Human
uucaaagaacuccggggaaacugggauagaac

SEQ ID NO: 534946 - RNA, 32 nt, Human
uucaaagaagcaggagaucuuuuauacagcca

SEQ ID NO: 534947 - RNA, 32 nt, Human
uucaaagaagugaggaugcaguuucucacguu

SEQ ID NO: 534948 - RNA, 32 nt, Human
uucaaagacagagaagaccaaagcauugccug

SEQ ID NO: 534949 - RNA, 32 nt, Human
uucaaagacagagagccaugagacuuucccaa

SEQ ID NO: 534950 - RNA, 32 nt, Human
uucaaagacccacagcuugagggggcagaggg

SEQ ID NO: 534951 - RNA, 32 nt, Human
uucaaagacgaggaaguaaggaagggaaugca

SEQ ID NO: 534952 - RNA, 32 nt, Human
uucaaagacuaguacuuacacaguuuagaaga

SEQ ID NO: 534953 - RNA, 21 nt, Human
uucaaagacugugcuacggga

SEQ ID NO: 534954 - RNA, 32 nt, Human
uucaaagagaagcaggagggcaagggaaaguu

SEQ ID NO: 534955 - RNA, 32 nt, Human
uucaaagagacaaacuccauuuucuuaugaau

SEQ ID NO: 534956 - RNA, 32 nt, Human
uucaaagagacuaugauggaccagcccugaga

SEQ ID NO: 534957 - RNA, 32 nt, Human
uucaaagagcacguaucuagaccugcuggacu

SEQ ID NO: 534958 - RNA, 32 nt, Human
uucaaagagcaucuccacaacccacagccuuc

SEQ ID NO: 534959 - RNA, 32 nt, Human
uucaaagaguuugucuacaggcgguuucucug

SEQ ID NO: 534960 - RNA, 32 nt, Human
uucaaagauguggucauuuacuucucucaaaa

SEQ ID NO: 534961 - RNA, 32 nt, Human
uucaaagauuaaguaggaggagagggguuucu

SEQ ID NO: 534962 - RNA, 32 nt, Human
uucaaagauucagagauuggcuuuugucaucc

SEQ ID NO: 534963 - RNA, 32 nt, Human
uucaaagauucugcaagucagacuggccucug

SEQ ID NO: 534964 - RNA, 32 nt, Human
uucaaagcaaacccuuacacacacaaagcccc

SEQ ID NO: 534965 - RNA, 32 nt, Human
uucaaagcaaaugaagugccuuuucccgaggc

SEQ ID NO: 534966 - RNA, 32 nt, Human
uucaaagcaaaugucuuccuggauuauucaaa

SEQ ID NO: 534967 - RNA, 32 nt, Human
uucaaagcaacaccaccaccacugaaguauuu

SEQ ID NO: 534968 - RNA, 32 nt, Human
uucaaagcaguagagaaaaauguaagauagga

SEQ ID NO: 534969 - RNA, 32 nt, Human
uucaaagccacugaggggaggaagggcagggc

SEQ ID NO: 534970 - RNA, 19 nt, Human
uucaaagccagaaauaaga

SEQ ID NO: 534971 - RNA, 32 nt, Human
uucaaagccagccugagccacauagugagacu

SEQ ID NO: 534972 - RNA, 32 nt, Human
uucaaagcccagcucaagcuucaucuuccuca

SEQ ID NO: 534973 - RNA, 32 nt, Human
uucaaagccucauuugcuuaucuugcuggagc

SEQ ID NO: 534974 - RNA, 32 nt, Human
uucaaagcuccauuucauaaaggggcuacuuu

SEQ ID NO: 534975 - RNA, 22 nt, Human
uucaaagcuccuucugcauugu

SEQ ID NO: 534976 - RNA, 32 nt, Human
uucaaagcucgaaaucaaauagcugcuggauu

SEQ ID NO: 534977 - RNA, 32 nt, Human
uucaaagcugcuccaccaugcugggucccagg

SEQ ID NO: 534978 - RNA, 32 nt, Human
uucaaagcuggguuagagaugaggcaccuuuu

SEQ ID NO: 534979 - RNA, 32 nt, Human
uucaaagcuuugaccugcacaaaugccauauu

SEQ ID NO: 534980 - RNA, 32 nt, Human
uucaaaggaaaugucuacaaugugaguuaaua

SEQ ID NO: 534981 - RNA, 19 nt, Human
uucaaaggaaugugccaug

SEQ ID NO: 534982 - RNA, 32 nt, Human
uucaaaggacaguguuguuuugaccgggagau

SEQ ID NO: 534983 - RNA, 32 nt, Human
uucaaaggagaggagagaagagacugagucgc

SEQ ID NO: 534984 - RNA, 32 nt, Human
uucaaaggcuaugaaauaguaaccucaagcca

SEQ ID NO: 534985 - RNA, 32 nt, Human
uucaaaggcugaggcaggcagaucaccugagg

SEQ ID NO: 534986 - RNA, 32 nt, Human
uucaaagggaaaggaagaggcaaagaggagca

SEQ ID NO: 534987 - RNA, 32 nt, Human
uucaaagggaaguguggucagcacacacugag

SEQ ID NO: 534988 - RNA, 32 nt, Human
uucaaagggaggacuugcuggggaccagaauc

SEQ ID NO: 534989 - RNA, 32 nt, Human
uucaaagucagcugaggggcugaggggugggg

SEQ ID NO: 534990 - RNA, 32 nt, Human
uucaaagucuguuucuugagcccugacugugu

SEQ ID NO: 534991 - RNA, 32 nt, Human
uucaaaguguauucaaguagguuuucugaaau

SEQ ID NO: 534992 - RNA, 32 nt, Human
uucaaaguguguggugccuccccucugucucc

SEQ ID NO: 534993 - RNA, 32 nt, Human
uucaaaguucuggacccagccauuccaguaga

SEQ ID NO: 534994 - RNA, 32 nt, Human
uucaaauaaccagacaccaagaugcagggccc

SEQ ID NO: 534995 - RNA, 32 nt, Human
uucaaauaacccagugacauaggucauauugc

SEQ ID NO: 534996 - RNA, 32 nt, Human
uucaaauaacccuugaauucaccaggucucau

SEQ ID NO: 534997 - RNA, 22 nt, Human
uucaaauaauagcauucauaug

SEQ ID NO: 534998 - RNA, 20 nt, Human
uucaaauagcaugauccaug

SEQ ID NO: 534999 - RNA, 32 nt, Human
uucaaauaucaaaaggaagauucuuccauuaa

SEQ ID NO: 535000 - RNA, 32 nt, Human
uucaaaucaaagcuaaaagccuaaaugugaaa

SEQ ID NO: 535001 - RNA, 32 nt, Human
uucaaaucaaauuagaauucacugagaauaau

SEQ ID NO: 535002 - RNA, 22 nt, Human
uucaaauccagauaguauuaca

SEQ ID NO: 535003 - RNA, 32 nt, Human
uucaaauccauagauuucgaagccacagaguc

SEQ ID NO: 535004 - RNA, 32 nt, Human
uucaaauccuaaaucacuucuuguaggagggu

SEQ ID NO: 535005 - RNA, 32 nt, Human
uucaaauccugcacucaggccugguggugaag

SEQ ID NO: 535006 - RNA, 32 nt, Human
uucaaaucucuccuccucccccucucuccuuc

SEQ ID NO: 535007 - RNA, 32 nt, Human
uucaaaucuuuccuccccauuugugagcugug

SEQ ID NO: 535008 - RNA, 32 nt, Human
uucaaaugaaaccagaaggugguuauguaaga

SEQ ID NO: 535009 - RNA, 32 nt, Human
uucaaaugaaguuucaguugcugaaaaccaau

SEQ ID NO: 535010 - RNA, 32 nt, Human
uucaaaugccuuucaaacauccuuugagauga

SEQ ID NO: 535011 - RNA, 32 nt, Human
uucaaaugcugugcagccaucuugccucaacu

SEQ ID NO: 535012 - RNA, 32 nt, Human
uucaaauggccauuuuucuccaauuuugguaa

SEQ ID NO: 535013 - RNA, 32 nt, Human
uucaaauggcugcuuaaaauugccugcaaaug

SEQ ID NO: 535014 - RNA, 32 nt, Human
uucaaauggggcuguuucuggaaaaaugaaaa

SEQ ID NO: 535015 - RNA, 32 nt, Human
uucaaauguauaugguucuggccacauuaaag

SEQ ID NO: 535016 - RNA, 32 nt, Human
uucaaauguauuacuaauguccuuccaaacag

SEQ ID NO: 535017 - RNA, 32 nt, Human
uucaaauguggacaaauuuuggaaaguauuuu

SEQ ID NO: 535018 - RNA, 32 nt, Human
uucaaauuagauguuucaacugugcuccuguu

SEQ ID NO: 535019 - RNA, 32 nt, Human
uucaaauuauuuagaagcagauuuuccuguag

SEQ ID NO: 535020 - RNA, 32 nt, Human
uucaaauucagggcauccaacauggugaagcc

SEQ ID NO: 535021 - RNA, 32 nt, Human
uucaaauuccaaaccuaccaucuucaguugug

SEQ ID NO: 535022 - RNA, 32 nt, Human
uucaaauuccaugacauuggaaaaaggucauc

SEQ ID NO: 535023 - RNA, 32 nt, Human
uucaaauucccaggaguagaccagcaucucug

SEQ ID NO: 535024 - RNA, 32 nt, Human
uucaaauugagauuguugccacugugguuugc

SEQ ID NO: 535025 - RNA, 32 nt, Human
uucaaauuuacaaggguucauuuuggaaacua

SEQ ID NO: 535026 - RNA, 32 nt, Human
uucaaauuugucagugacauuuaccaaacaaa

SEQ ID NO: 535027 - RNA, 32 nt, Human
uucaaauuuuggugucuguuaauaaaguuuua

SEQ ID NO: 535028 - RNA, 32 nt, Human
uucaacaaaguauuggaaguccuggucagagc

SEQ ID NO: 535029 - RNA, 32 nt, Human
uucaacaacagugacuugcucuccaaugguau

SEQ ID NO: 535030 - RNA, 32 nt, Human
uucaacaacucuccagcucugaauggagaaac

SEQ ID NO: 535031 - RNA, 32 nt, Human
uuccagaaagucuuugagggaggaccuauacc

SEQ ID NO: 535032 - RNA, 32 nt, Human
uuccagaaaugagaguggcaucuuuauggaau

SEQ ID NO: 535033 - RNA, 32 nt, Human
uuccagaaaugccacacuugugugccacagag

SEQ ID NO: 535034 - RNA, 32 nt, Human
uuccagaacaacucuuucccaccccaacacca

SEQ ID NO: 535035 - RNA, 32 nt, Human
uuccagaacacugcuacuagguucugaauguu

SEQ ID NO: 535036 - RNA, 32 nt, Human
uuccagaaccuuuuaugucucucgugagccau

SEQ ID NO: 535037 - RNA, 32 nt, Human
uuccagaacgccgccucccacccagaucgcgg

SEQ ID NO: 535038 - RNA, 32 nt, Human
uuccagaacucaugccagauacuuaguccagu

SEQ ID NO: 535039 - RNA, 32 nt, Human
uuccagaagaaagauggaaauucugaaaacug

SEQ ID NO: 535040 - RNA, 32 nt, Human
uuccagaagagacucgggcuguggaaggaaca

SEQ ID NO: 535041 - RNA, 32 nt, Human
uuccagaagauaagacagacucauagagauua

SEQ ID NO: 535042 - RNA, 32 nt, Human
uuccagaagcaggaguccccagagccaggcag

SEQ ID NO: 535043 - RNA, 32 nt, Human
uuccagaagugaugcaguggugugagaugccc

SEQ ID NO: 535044 - RNA, 32 nt, Human
uuccagaaugccuagaggaaggggguuccuuu

SEQ ID NO: 535045 - RNA, 32 nt, Human
uuccagaaugguauggaaucugagggaagauu

SEQ ID NO: 535046 - RNA, 32 nt, Human
uuccagacacagacaugcuggcagugagagug

SEQ ID NO: 535047 - RNA, 32 nt, Human
uuccagacacuccugaauuuacuuggauuuaa

SEQ ID NO: 535048 - RNA, 32 nt, Human
uuccagaccaaccuggccaacaugguaaaacc

SEQ ID NO: 535049 - RNA, 32 nt, Human
uuccagaccacccuggccaacauggugaaacc

SEQ ID NO: 535050 - RNA, 32 nt, Human
uuccagaccagccccucacaccacagccaaga

SEQ ID NO: 535051 - RNA, 32 nt, Human
uuccagaccagccccucacaccacagccagga

SEQ ID NO: 535052 - RNA, 32 nt, Human
uuccagaccagccccucacaccaccgccagga

SEQ ID NO: 535053 - RNA, 32 nt, Human
uuccagaccagcccgggccuauggcgaaacuc

SEQ ID NO: 535054 - RNA, 32 nt, Human
uuccagaccagccuaggcagcuuggcaagacc

SEQ ID NO: 535055 - RNA, 32 nt, Human
uuccagaccagccugaccaaaauggugaaacc

SEQ ID NO: 535056 - RNA, 32 nt, Human
uuccagaccagccugaccaacguggugaaacu

SEQ ID NO: 535057 - RNA, 24 nt, Human
uuccagaccagccuggccaacaua

SEQ ID NO: 535058 - RNA, 32 nt, Human
uuccagaccagccuggccaacauagugaaacc

SEQ ID NO: 535059 - RNA, 24 nt, Human
uuccagaccagccuggccaacaug

SEQ ID NO: 535060 - RNA, 32 nt, Human
uuccagaccagccuggccaacaugaugaaacc

SEQ ID NO: 535061 - RNA, 32 nt, Human
uuccagaccagccuggccaacauggcaaaacc

SEQ ID NO: 535062 - RNA, 32 nt, Human
uuccagaccagccuggccaacauggcuuucuu

SEQ ID NO: 535063 - RNA, 32 nt, Human
uuccagaccagccuggccaacauggugaaacc

SEQ ID NO: 535064 - RNA, 32 nt, Human
uuccagaccagccuggccaacauggugaaacu

SEQ ID NO: 535065 - RNA, 32 nt, Human
uuccagaccagccuggccaccuuagugagauc

SEQ ID NO: 535066 - RNA, 32 nt, Human
uuccagaccagccuggccaucauggugaaauc

SEQ ID NO: 535067 - RNA, 24 nt, Human
uuccagaccagccuggcuaauaug

SEQ ID NO: 535068 - RNA, 32 nt, Human
uuccagaccagccuggcuaauauggugaaacc

SEQ ID NO: 535069 - RNA, 32 nt, Human
uuccagaccagccugggaaacgcaaagcgacc

SEQ ID NO: 535070 - RNA, 24 nt, Human
uuccagaccagccugggcaacaua

SEQ ID NO: 535071 - RNA, 32 nt, Human
uuccagaccagccugggcaacauagcaaaauc

SEQ ID NO: 535072 - RNA, 32 nt, Human
uuccagaccagccugggcaacauagugagacu

SEQ ID NO: 535073 - RNA, 32 nt, Human
uuccagaccagccugggcaacauagugagauc

SEQ ID NO: 535074 - RNA, 24 nt, Human
uuccagaccagccugggcaacaug

SEQ ID NO: 535075 - RNA, 32 nt, Human
uuccagaccagccugggcaacaugcgagaccc

SEQ ID NO: 535076 - RNA, 22 nt, Human
uuccagaccagccugggcaaua

SEQ ID NO: 535077 - RNA, 32 nt, Human
uuccagaccagccugggcaauacagcgagaac

SEQ ID NO: 535078 - RNA, 24 nt, Human
uuccagaccagccugggcaauaua

SEQ ID NO: 535079 - RNA, 24 nt, Human
uuccagaccagccugggcaaugua

SEQ ID NO: 535080 - RNA, 32 nt, Human
uuccagaccagccugggcaauguagcaagacg

SEQ ID NO: 535081 - RNA, 32 nt, Human
uuccagaccagccugggcagcaucgugagacc

SEQ ID NO: 535082 - RNA, 24 nt, Human
uuccagaccagccuggguaaugua

SEQ ID NO: 535083 - RNA, 32 nt, Human
uuccagaccagccuggguaauguagcgagacc

SEQ ID NO: 535084 - RNA, 24 nt, Human
uuccagaccagccuggucaacaug

SEQ ID NO: 535085 - RNA, 32 nt, Human
uuccagaccagccuggucaacauggugaaacc

SEQ ID NO: 535086 - RNA, 32 nt, Human
uuccagaccagccuguucaacauggcgaaacc

SEQ ID NO: 535087 - RNA, 32 nt, Human
uuccagaccaggcuggccgacauggugaaacc

SEQ ID NO: 535088 - RNA, 24 nt, Human
uuccagaccagugugggcaacgua

SEQ ID NO: 535089 - RNA, 32 nt, Human
uuccagaccauuccaggcagggagagcugcug

SEQ ID NO: 535090 - RNA, 32 nt, Human
uuccagaccccacaguagagcacuuuucacuu

SEQ ID NO: 535091 - RNA, 23 nt, Human
uuccagaccgccugggcaacaug

SEQ ID NO: 535092 - RNA, 32 nt, Human
uuccagaccuggguuugugcagcuccaagcuc

SEQ ID NO: 535093 - RNA, 32 nt, Human
uuccagacuagccugggcaacauagagagacc

SEQ ID NO: 535094 - RNA, 32 nt, Human
uuccagacuuaagaauuuuauggcauggccca

SEQ ID NO: 535095 - RNA, 32 nt, Human
uuccagagacaauuguagaaauauugcugcau

SEQ ID NO: 535096 - RNA, 32 nt, Human
uuccagagagaagagaaaacucacccaggaag

SEQ ID NO: 535097 - RNA, 32 nt, Human
uuccagagagggcagggcaauggcagugacau

SEQ ID NO: 535098 - RNA, 32 nt, Human
uuccagagauggaguuucaccacguuggccaa

SEQ ID NO: 535099 - RNA, 32 nt, Human
uuccagagcagccugggcaacgcagugagaga

SEQ ID NO: 535100 - RNA, 32 nt, Human
uuccagagccacaggcccuggauuuuauccaa

SEQ ID NO: 535101 - RNA, 32 nt, Human
uuccagagccuucucuucacauaaugggacau

SEQ ID NO: 535102 - RNA, 32 nt, Human
uuccagagcuuugugcucaggcuacuaaagua

SEQ ID NO: 535103 - RNA, 31 nt, Human
uuccagaggaaaccuguuugacuugauagau

SEQ ID NO: 535104 - RNA, 32 nt, Human
uuccagaggaaaccuguuugacuugauagaug

SEQ ID NO: 535105 - RNA, 32 nt, Human
uuccagaggaagaagcaggcagcaaccuuugc

SEQ ID NO: 535106 - RNA, 32 nt, Human
uuccagaggaagacacagcuuaguagcuuaag

SEQ ID NO: 535107 - RNA, 32 nt, Human
uuccagaggaagaggaggaggcggcgaagcgu

SEQ ID NO: 535108 - RNA, 32 nt, Human
uuccagaggaaggaauacacagcaaucuuugc

SEQ ID NO: 535109 - RNA, 22 nt, Human
uuccagaggcaaauacuuuuca

SEQ ID NO: 535110 - RNA, 32 nt, Human
uuccagaggcugggaacacggcccaccuagca

SEQ ID NO: 535111 - RNA, 21 nt, Human
uuccagagggaggugcuguua

SEQ ID NO: 535112 - RNA, 32 nt, Human
uuccagagggauggggcagagcuccaggccuc

SEQ ID NO: 535113 - RNA, 32 nt, Human
uuccagagggucucgcucuccuucccuuuuuc

SEQ ID NO: 535114 - RNA, 32 nt, Human
uuccagagguaaaccaggucucagggaagagc

SEQ ID NO: 535115 - RNA, 32 nt, Human
uuccagagguuagaaaacuugcuugaaguucc

SEQ ID NO: 535116 - RNA, 32 nt, Human
uuccagagugcuuacagaaggccaggugcuuu

SEQ ID NO: 535117 - RNA, 19 nt, Human
uuccagaucagcagggaga

SEQ ID NO: 535118 - RNA, 32 nt, Human
uuccagaucagcaugggcaacaugguaagacc

SEQ ID NO: 535119 - RNA, 24 nt, Human
uuccagaucagccugagcaacaua

SEQ ID NO: 535120 - RNA, 32 nt, Human
uuccagaucagccugagcaacauagcaagaug

SEQ ID NO: 535121 - RNA, 24 nt, Human
uuccagaucagccuggccaacaug

SEQ ID NO: 535122 - RNA, 32 nt, Human
uuccagaucagccuggccaacauggugaaacc

SEQ ID NO: 535123 - RNA, 31 nt, Human
uuccagauccucucuggggcuguguuuugag

SEQ ID NO: 535124 - RNA, 32 nt, Human
uuccagaucgcuggccccagaacccugucccc

SEQ ID NO: 535125 - RNA, 31 nt, Human
uuccagaugcuucugacuaagaucccaacaa

SEQ ID NO: 535126 - RNA, 32 nt, Human
uuccagauggagucucgcuuuguugcccaggc

SEQ ID NO: 535127 - RNA, 32 nt, Human
uuccagauggcgaggucacagcagagagaugu

SEQ ID NO: 535128 - RNA, 32 nt, Human
uuccagaugggaacuggugcaagcugcuuugc

SEQ ID NO: 535129 - RNA, 32 nt, Human
uuccagaugguccaggccuccuuugugcauga

SEQ ID NO: 535130 - RNA, 32 nt, Human
uuccagauuacacuccagccugagucagcacc

SEQ ID NO: 535131 - RNA, 23 nt, Human
uuccagauucccagauuuugugc

SEQ ID NO: 535132 - RNA, 32 nt, Human
uuccagauucuguguuccucccuucccugccc

SEQ ID NO: 535133 - RNA, 32 nt, Human
uuccagauuguuuccagcuguaacagguauug

SEQ ID NO: 535134 - RNA, 32 nt, Human
uuccagcaacaaucauuuauuguuaaaccugg

SEQ ID NO: 535135 - RNA, 32 nt, Human
uuccagcaacccagucuccugccauguccgac

SEQ ID NO: 535136 - RNA, 32 nt, Human
uuccagcacccagccggcccuccgucuccuga

SEQ ID NO: 535137 - RNA, 32 nt, Human
uuccagcacuuccggccugaccccuguccagc

SEQ ID NO: 535138 - RNA, 23 nt, Human
uuccagcacuuucugucauucca

SEQ ID NO: 535139 - RNA, 32 nt, Human
uuccagcagcagacccagcaaugaaugauccg

SEQ ID NO: 535140 - RNA, 21 nt, Human
uuccagcagcuccugcccccu

SEQ ID NO: 535141 - RNA, 32 nt, Human
uuccagcaguuugcucuugagacaugguaauc

SEQ ID NO: 535142 - RNA, 32 nt, Human
uuccagcaucugcugguagcaggcugggacag

SEQ ID NO: 535143 - RNA, 32 nt, Human
uuccagcaugauguucuugucuuuggagcuua

SEQ ID NO: 535144 - RNA, 21 nt, Human
uuccagcaugucgccaacgca

SEQ ID NO: 535145 - RNA, 32 nt, Human
uuccagccaaacaggggagcccagggagaaua

SEQ ID NO: 535146 - RNA, 32 nt, Human
uuccagccaagaaaauagacugaggugcuuau

SEQ ID NO: 535147 - RNA, 32 nt, Human
uuccagccacaucgccugagauugacaacgcc

SEQ ID NO: 535148 - RNA, 22 nt, Human
uuccagccacucaggaggcuga

SEQ ID NO: 535149 - RNA, 22 nt, Human
uuccagccacucgagaggcuga

SEQ ID NO: 535150 - RNA, 32 nt, Human
uuccagccauguccaguaaacaauuuagagca

SEQ ID NO: 535151 - RNA, 32 nt, Human
uuccagcccaggaguucaagaccagccugggc

SEQ ID NO: 535152 - RNA, 22 nt, Human
uuccagcccuccuaauaccuca

SEQ ID NO: 535153 - RNA, 32 nt, Human
uuccagcccugcugcuugccagacacacagaa

SEQ ID NO: 535154 - RNA, 32 nt, Human
uuccagccggcauggcugggaacugcagaccu

SEQ ID NO: 535155 - RNA, 18 nt, Human
uuccagccgguggcacag

SEQ ID NO: 535156 - RNA, 20 nt, Human
uuccagccuaggcaacagag

SEQ ID NO: 535157 - RNA, 21 nt, Human
uuccagccuaggcaacagagu

SEQ ID NO: 535158 - RNA, 21 nt, Human
uuccagccuaggcgacagagu

SEQ ID NO: 535159 - RNA, 32 nt, Human
uuccagccucaggucccagcugucucacguug

SEQ ID NO: 535160 - RNA, 32 nt, Human
uuccagccuccaccuacugcccaauuccagag

SEQ ID NO: 535161 - RNA, 32 nt, Human
uuccagccuccccucaggcuuuccagucacca

SEQ ID NO: 535162 - RNA, 21 nt, Human
uuccagccucugccccucagg

SEQ ID NO: 535163 - RNA, 20 nt, Human
uuccagccugagcaacagag

SEQ ID NO: 535164 - RNA, 21 nt, Human
uuccagccugagcgacagagu

SEQ ID NO: 535165 - RNA, 32 nt, Human
uuccagccugcucugcucgcgugccuuucugu

SEQ ID NO: 535166 - RNA, 32 nt, Human
uuccagccuggcgacagagcaagacuccaucu

SEQ ID NO: 535167 - RNA, 20 nt, Human
uuccagccugggcaacagag

SEQ ID NO: 535168 - RNA, 21 nt, Human
uuccagccugggcaacagagu

SEQ ID NO: 535169 - RNA, 21 nt, Human
uuccagccugggcaauagagu

SEQ ID NO: 535170 - RNA, 20 nt, Human
uuccagccugggcgacagag

SEQ ID NO: 535171 - RNA, 21 nt, Human
uuccagccugggcgacagagu

SEQ ID NO: 535172 - RNA, 25 nt, Human
uuccagccugggugacagagcgaga

SEQ ID NO: 535173 - RNA, 25 nt, Human
uuccagccugggugacagagugaga

SEQ ID NO: 535174 - RNA, 32 nt, Human
uuccagccuggugacagagcgagacucagucu

SEQ ID NO: 535175 - RNA, 32 nt, Human
uuccagccuuaagaguuguggaagagaagaaa

SEQ ID NO: 535176 - RNA, 32 nt, Human
uuccagccuugugaaggaacugguuuuguuuu

SEQ ID NO: 535177 - RNA, 32 nt, Human
uuccagccuuucuagccugcccucugcugcca

SEQ ID NO: 535178 - RNA, 32 nt, Human
uuccagcgagacgucagagaacucacagucuu

SEQ ID NO: 535179 - RNA, 23 nt, Human
uuccagcgcaggcugcugcucgu

SEQ ID NO: 535180 - RNA, 32 nt, Human
uuccagcggcaggcugugcaccagaggucccg

SEQ ID NO: 535181 - RNA, 32 nt, Human
uuccagcggugccacccaaucaugcccagcuu

SEQ ID NO: 535182 - RNA, 32 nt, Human
uuccagcgucaagcucucugggcagcugcugg

SEQ ID NO: 535183 - RNA, 32 nt, Human
uuccagcgucauuucaaagagcuauuguuuuu

SEQ ID NO: 535184 - RNA, 22 nt, Human
uuccagcuacccaggaggcuga

SEQ ID NO: 535185 - RNA, 22 nt, Human
uuccagcuacucaggaggcuga

SEQ ID NO: 535186 - RNA, 22 nt, Human
uuccagcuacucgggaggccga

SEQ ID NO: 535187 - RNA, 20 nt, Human
uuccagcuacucgggaggcu

SEQ ID NO: 535188 - RNA, 22 nt, Human
uuccagcuacucgggaggcuga

SEQ ID NO: 535189 - RNA, 32 nt, Human
uuccagcuacuugggagguugaggcaggagaa

SEQ ID NO: 535190 - RNA, 24 nt, Human
uuccagcuagauguugucauugca

SEQ ID NO: 535191 - RNA, 32 nt, Human
uuccagcuaggacacagcaggucgugauccgg

SEQ ID NO: 535192 - RNA, 32 nt, Human
uuccagcucacugcgcagccugggaggaggcg

SEQ ID NO: 535193 - RNA, 32 nt, Human
uuccagcucagagcuccucccaccccaacaua

SEQ ID NO: 535194 - RNA, 32 nt, Human
uuccagcuccaaggacugggaaccuccaaugc

SEQ ID NO: 535195 - RNA, 32 nt, Human
uuccagcuccaccuccacuaccacuccaagcc

SEQ ID NO: 535196 - RNA, 32 nt, Human
uuccagcucccgguaaaacacaauuuauuucu

SEQ ID NO: 535197 - RNA, 32 nt, Human
uuccagcuccuccuccugacugaccgcuggca

SEQ ID NO: 535198 - RNA, 32 nt, Human
uuccagcuccuugguguugguuugcaauaaau

SEQ ID NO: 535199 - RNA, 32 nt, Human
uuccagcucuuaaaauucuuuaucuuuuucuu

SEQ ID NO: 535200 - RNA, 23 nt, Human
uuccagcugcaugggaaagcaaa

SEQ ID NO: 535201 - RNA, 32 nt, Human
uuccagcugccucucauguacuugucuguugg

SEQ ID NO: 535202 - RNA, 16 nt, Human
uuccagcugccugcca

SEQ ID NO: 535203 - RNA, 32 nt, Human
uuccagcugcuugggagccugaggcaggagaa

SEQ ID NO: 535204 - RNA, 32 nt, Human
uuccagcugcuugucuggccugagcugugggg

SEQ ID NO: 535205 - RNA, 32 nt, Human
uuccagcugggcagauaguugagggcucccug

SEQ ID NO: 535206 - RNA, 32 nt, Human
uuccagcugugccucugcugccagccaagucu

SEQ ID NO: 535207 - RNA, 32 nt, Human
uuccagcuguguucuguggaggucacuuguga

SEQ ID NO: 535208 - RNA, 32 nt, Human
uuccagcuguguugcuggcaguguugucucaa

SEQ ID NO: 535209 - RNA, 20 nt, Human
uuccagcuguuggcucuuua

SEQ ID NO: 535210 - RNA, 32 nt, Human
uuccagcuucauggaccuggagaugugcccuu

SEQ ID NO: 535211 - RNA, 32 nt, Human
uuccaggaaaugcuuggauucauguggacauu

SEQ ID NO: 535212 - RNA, 32 nt, Human
uuccaggaacacaaaccccaacaagauccaau

SEQ ID NO: 535213 - RNA, 32 nt, Human
uuccaggaacucaggaucugcagugaggacca

SEQ ID NO: 535214 - RNA, 23 nt, Human
uuccaggaagagugugcuuguca

SEQ ID NO: 535215 - RNA, 32 nt, Human
uuccaggaagcacaggccaggggaucugggug

SEQ ID NO: 535216 - RNA, 22 nt, Human
uuccaggacaaacaucuuugga

SEQ ID NO: 535217 - RNA, 32 nt, Human
uuccaggaccccuguggcuaccaaaauccaug

SEQ ID NO: 535218 - RNA, 32 nt, Human
uuccaggacccuacaagagauggagaugucau

SEQ ID NO: 535219 - RNA, 32 nt, Human
uuccaggaccuccauuccacucaucucuggcc

SEQ ID NO: 535220 - RNA, 32 nt, Human
uuccaggacugggccagcuauggggguggcag

SEQ ID NO: 535221 - RNA, 32 nt, Human
uuccaggagaaaaauuccaagaguuacaaucu

SEQ ID NO: 535222 - RNA, 32 nt, Human
uuccaggagagaaagggaccgcuuggagcagu

SEQ ID NO: 535223 - RNA, 32 nt, Human
uuccaggaggcguuuggggguggggaaggcac

SEQ ID NO: 535224 - RNA, 32 nt, Human
uuccaggagggaucccaggaacugugggcacc

SEQ ID NO: 535225 - RNA, 32 nt, Human
uuccaggagggggaagaggaguggggaguggg

SEQ ID NO: 535226 - RNA, 32 nt, Human
uuccaggagucuuggcaucucauagcuugucc

SEQ ID NO: 535227 - RNA, 32 nt, Human
uuccaggcaaagcugcuucucuuccccagacc

SEQ ID NO: 535228 - RNA, 32 nt, Human
uuccaggcagagcacagcccacugccucccuc

SEQ ID NO: 535229 - RNA, 32 nt, Human
uuccaggccagccagaugggacugccuugucu

SEQ ID NO: 535230 - RNA, 32 nt, Human
uuccaggcccuugacugcuccuuugggcuggg

SEQ ID NO: 535231 - RNA, 32 nt, Human
uuccaggccugaucuugccugucuggcucagg

SEQ ID NO: 535232 - RNA, 32 nt, Human
uuccaggcucaagcgguccuucuaccucagcc

SEQ ID NO: 535233 - RNA, 22 nt, Human
uuccaggcucccugucuuuggg

SEQ ID NO: 535234 - RNA, 32 nt, Human
uuccaggcucucuucucucccucucucuccuu

SEQ ID NO: 535235 - RNA, 32 nt, Human
uuccaggcugcaaugcugaaucuugcugaauu

SEQ ID NO: 535236 - RNA, 32 nt, Human
uuccaggcuggagucgguuccacccacucgcc

SEQ ID NO: 535237 - RNA, 21 nt, Human
uuccaggcuggagugcagugg

SEQ ID NO: 535238 - RNA, 32 nt, Human
uuccaggcuggccucaaacuccugggcucaag

SEQ ID NO: 535239 - RNA, 32 nt, Human
uuccaggcugguaccaggucucaccaugggga

SEQ ID NO: 535240 - RNA, 32 nt, Human
uuccaggcuuacgacccugggcucacggguac

SEQ ID NO: 535241 - RNA, 32 nt, Human
uuccaggcuucaaagcugcacagagucuacgu

SEQ ID NO: 535242 - RNA, 21 nt, Human
uuccagggaaaauccucuuug

SEQ ID NO: 535243 - RNA, 22 nt, Human
uuccagggaaacacaugcugga

SEQ ID NO: 535244 - RNA, 32 nt, Human
uuccagggaaacacaugcuggacaucccuugu

SEQ ID NO: 535245 - RNA, 20 nt, Human
uuccagggaccuaugucuuu

SEQ ID NO: 535246 - RNA, 32 nt, Human
uuccagggagaggcagcugagaucagaagaga

SEQ ID NO: 535247 - RNA, 32 nt, Human
uuccagggagaggcagcugagaucagaaggga

SEQ ID NO: 535248 - RNA, 32 nt, Human
uuccagggagcagcaugggccccacugaaugg

SEQ ID NO: 535249 - RNA, 32 nt, Human
uuccagggagccaaagggggagccagagagcc

SEQ ID NO: 535250 - RNA, 32 nt, Human
uuccagggaggcggccggggcagggggcuuag

SEQ ID NO: 535251 - RNA, 32 nt, Human
uuccagggagugagaaaagcagcccggcuaga

SEQ ID NO: 535252 - RNA, 32 nt, Human
uuccagggauaaaaggaggcagacaagaacug

SEQ ID NO: 535253 - RNA, 32 nt, Human
uuccagggaucucugggcuggucuguggggcc

SEQ ID NO: 535254 - RNA, 32 nt, Human
uuccagggccagagaaggagaacuaggcaagu

SEQ ID NO: 535255 - RNA, 32 nt, Human
uuccagggccuuuucccacuaaguaguauugc

SEQ ID NO: 535256 - RNA, 32 nt, Human
uuccagggcugaaugccuucuuccugcaggcu

SEQ ID NO: 535257 - RNA, 32 nt, Human
uuccagggcugaggggacugagugagcugccu

SEQ ID NO: 535258 - RNA, 17 nt, Human
uuccaggggagguucag

SEQ ID NO: 535259 - RNA, 32 nt, Human
uuccaggggccucugugucccgcacugugugu

SEQ ID NO: 535260 - RNA, 32 nt, Human
uuccagggggcugaggcacacagagaggccaa

SEQ ID NO: 535261 - RNA, 20 nt, Human
uuccagggguccagggccag

SEQ ID NO: 535262 - RNA, 32 nt, Human
uuccaggguagaggaaugugccuccaauaaua

SEQ ID NO: 535263 - RNA, 32 nt, Human
uuccagggugccaagaaggaagaaaagcccca

SEQ ID NO: 535264 - RNA, 32 nt, Human
uuccaggguuuagggagugcagugaugucgau

SEQ ID NO: 535265 - RNA, 32 nt, Human
uuccagguacacaaugaaguuuuaaauguuua

SEQ ID NO: 535266 - RNA, 32 nt, Human
uuccagguacucaggaugaaugguuugaggac

SEQ ID NO: 535267 - RNA, 32 nt, Human
uuccaggucacugcaucugucucuccaccaug

SEQ ID NO: 535268 - RNA, 32 nt, Human
uuccaggucauucucucugacucucaucugca

SEQ ID NO: 535269 - RNA, 32 nt, Human
uuccagguccaggagucagcccugcaggcuca

SEQ ID NO: 535270 - RNA, 32 nt, Human
uuccaggugaugcuguuguugcuggucuagag

SEQ ID NO: 535271 - RNA, 32 nt, Human
uuccaggugcccuggcuggagucaguccucau

SEQ ID NO: 535272 - RNA, 32 nt, Human
uuccagguucaagugauucuccugccucagcc

SEQ ID NO: 535273 - RNA, 32 nt, Human
uuccagguucacgccauucuccugccucagcc

SEQ ID NO: 535274 - RNA, 18 nt, Human
uuccagguucuggcuccu

SEQ ID NO: 535275 - RNA, 32 nt, Human
uuccagguucuugggaggaagggagaaaagaa

SEQ ID NO: 535276 - RNA, 32 nt, Human
uuccagguuggcacagaugaugaggucugaga

SEQ ID NO: 535277 - RNA, 32 nt, Human
uuccaguacagcuguagcaagaugcgcaggca

SEQ ID NO: 535278 - RNA, 32 nt, Human
uuccaguaguuucacacaccacuuauggggaa

SEQ ID NO: 535279 - RNA, 32 nt, Human
uuccaguaugaccacacccaauaacuguuauu

SEQ ID NO: 535280 - RNA, 32 nt, Human
uuccagucauuauuguuacaucauguuugcag

SEQ ID NO: 535281 - RNA, 32 nt, Human
uuccaguccacguggauauaaugauaucuaua

SEQ ID NO: 535282 - RNA, 32 nt, Human
uuccaguccagcaugggucuggggaagaggag

SEQ ID NO: 535283 - RNA, 32 nt, Human
uuccaguccagccucagagaucaggcucuggg

SEQ ID NO: 535284 - RNA, 19 nt, Human
uuccaguccccacugacca

SEQ ID NO: 535285 - RNA, 32 nt, Human
uuccaguccuggaggcagguugugcagcuuag

SEQ ID NO: 535286 - RNA, 32 nt, Human
uuccagucgccuagcuagggccaaucacggag

SEQ ID NO: 535287 - RNA, 32 nt, Human
uuccagucgugugguuucucccauacccugac

SEQ ID NO: 535288 - RNA, 32 nt, Human
uuccagucuacaccaggccucuccaaggagac

SEQ ID NO: 535289 - RNA, 32 nt, Human
uuccagucucaagugauccucugccucagccu

SEQ ID NO: 535290 - RNA, 32 nt, Human
uuccagucugguugcagaaccugcacauuugc

SEQ ID NO: 535291 - RNA, 32 nt, Human
uuccagucuugcucugcccuccggagaugaca

SEQ ID NO: 535292 - RNA, 24 nt, Human
uuccagugacucaguugaaacuca

SEQ ID NO: 535293 - RNA, 32 nt, Human
uuccagugagcagcagcugcacguccgaggcu

SEQ ID NO: 535294 - RNA, 32 nt, Human
uuccagugagcuuaucaugcugucuuuacaug

SEQ ID NO: 535295 - RNA, 32 nt, Human
uuccagugaggagagccagccgggaggucagu

SEQ ID NO: 535296 - RNA, 32 nt, Human
uuccagugaggccaagggguccuggccggguu

SEQ ID NO: 535297 - RNA, 22 nt, Human
uuccagugauauucugcaauca

SEQ ID NO: 535298 - RNA, 32 nt, Human
uuccagugauuuucacugcugucaguagaaaa

SEQ ID NO: 535299 - RNA, 32 nt, Human
uuccagugcaccuguaggaacaacuagacuuc

SEQ ID NO: 535300 - RNA, 32 nt, Human
uuccagugccuauccgugggauccuucacguu

SEQ ID NO: 535301 - RNA, 32 nt, Human
uuccagugccugacuugggauaggacugagug

SEQ ID NO: 535302 - RNA, 32 nt, Human
uuccagugcucauucgugacacugcugcucuc

SEQ ID NO: 535303 - RNA, 32 nt, Human
uuccaguggaaaugucacuugcuacagacaau

SEQ ID NO: 535304 - RNA, 32 nt, Human
uuccaguggacccuggaccauuccaggaaaac

SEQ ID NO: 535305 - RNA, 32 nt, Human
uuccaguggaccugggcuguuguugcgguugu

SEQ ID NO: 535306 - RNA, 32 nt, Human
uuccaguggcucugccauagccccagacaagc

SEQ ID NO: 535307 - RNA, 32 nt, Human
uuccaguggugaggcagucugagaauguguga

SEQ ID NO: 535308 - RNA, 32 nt, Human
uuccaguguccuccccagccuccugagacucc

SEQ ID NO: 535309 - RNA, 32 nt, Human
uuccagugucuccugguaacuggaaccucucc

SEQ ID NO: 535310 - RNA, 32 nt, Human
uuccaguuagugacuuuugccccauaguuggg

SEQ ID NO: 535311 - RNA, 32 nt, Human
uuccaguucagacucuaacuucucccaaagug

SEQ ID NO: 535312 - RNA, 32 nt, Human
uuccaguuccacccuuuccugcggcaccacca

SEQ ID NO: 535313 - RNA, 32 nt, Human
uuccaguuccacccuuuccugcggcaccaccu

SEQ ID NO: 535314 - RNA, 32 nt, Human
uuccaguugcaagugauucuccugccucagcc

SEQ ID NO: 535315 - RNA, 32 nt, Human
uuccaguugucacuauccuugacucauugcac

SEQ ID NO: 535316 - RNA, 32 nt, Human
uuccaguuuacugaacuccagaccaugcaugu

SEQ ID NO: 535317 - RNA, 32 nt, Human
uuccaguuucaggugauccuccugccucagcc

SEQ ID NO: 535318 - RNA, 32 nt, Human
uuccaguuuuccccuugcuucccaggcccuug

SEQ ID NO: 535319 - RNA, 32 nt, Human
uuccaguuuucuucaaacaaugcuucagugaa

SEQ ID NO: 535320 - RNA, 32 nt, Human
uuccauaaagaauggcccuuguggauaagcac

SEQ ID NO: 535321 - RNA, 32 nt, Human
uuccauaaagaguagcucaaaauaugcaauua

SEQ ID NO: 535322 - RNA, 32 nt, Human
uuccauaauaaacuguuaggugcucuugaaga

SEQ ID NO: 535323 - RNA, 21 nt, Human
uuccauaaucacucagugauu

SEQ ID NO: 535324 - RNA, 32 nt, Human
uuccauacacauccccagccagaaguuagugu

SEQ ID NO: 535325 - RNA, 32 nt, Human
uuccauacagcagugccuauauagugacugau

SEQ ID NO: 535326 - RNA, 32 nt, Human
uuccauacgaguuuugguuuuguuuuuaauau

SEQ ID NO: 535327 - RNA, 32 nt, Human
uuccauacugaaagaagagcaaauacaaaagc

SEQ ID NO: 535328 - RNA, 32 nt, Human
uuccauacugaguuuaaaauuuauuaauuugu

SEQ ID NO: 535329 - RNA, 18 nt, Human
uuccauagauagcuuuuu

SEQ ID NO: 535330 - RNA, 32 nt, Human
uuccauagccaucuacucucuugagccuuugg

SEQ ID NO: 535331 - RNA, 32 nt, Human
uuccauaggacccagugcuuucaucuccgugc

SEQ ID NO: 535332 - RNA, 32 nt, Human
uuccauagucaccuacuuccuguccuccucgg

SEQ ID NO: 535333 - RNA, 32 nt, Human
uuccauagucuuuguccccaagggccuuccag

SEQ ID NO: 535334 - RNA, 32 nt, Human
uuccauauaccugauagucuguguacagcauu

SEQ ID NO: 535335 - RNA, 32 nt, Human
uuccauauaugccaccagccaaguggccaucc

SEQ ID NO: 535336 - RNA, 32 nt, Human
uuccauaucuacuuacacauacaccagcaaca

SEQ ID NO: 535337 - RNA, 32 nt, Human
uuccauaucugugggcuuuguucuacauuugg

SEQ ID NO: 535338 - RNA, 32 nt, Human
uuccauauguguguccucucuuccacaccaua

SEQ ID NO: 535339 - RNA, 31 nt, Human
uuccauauguugagauucuacuuauucauca

SEQ ID NO: 535340 - RNA, 32 nt, Human
uuccaucaaagccucccccucccccaccccuu

SEQ ID NO: 535341 - RNA, 32 nt, Human
uuccaucaaauuuuaaguuaucuuuaaccccu

SEQ ID NO: 535342 - RNA, 32 nt, Human
uuccaucaagcaccagaguugcaguggcuugg

SEQ ID NO: 535343 - RNA, 32 nt, Human
uuccaucacaugcuucuuaggcagcagggagc

SEQ ID NO: 535344 - RNA, 32 nt, Human
uuccaucaccacccuugucucucuacacauuu

SEQ ID NO: 535345 - RNA, 32 nt, Human
uuccaucacccacugcaaccagccagcugccg

SEQ ID NO: 535346 - RNA, 32 nt, Human
uuccaucagaaggugcccagcgcuacuuccca

SEQ ID NO: 535347 - RNA, 32 nt, Human
uuccaucagugucuuccagccugcauggggag

SEQ ID NO: 535348 - RNA, 32 nt, Human
uuccaucaugacccuuggacugggugagagca

SEQ ID NO: 535349 - RNA, 32 nt, Human
uuccaucaugagugcagugucaucucagcggg

SEQ ID NO: 535350 - RNA, 32 nt, Human
uuccauccaucuuuccauccauuaccuccauc

SEQ ID NO: 535351 - RNA, 32 nt, Human
uuccaucccagaaaguccugcgggacagauuc

SEQ ID NO: 535352 - RNA, 32 nt, Human
uuccauccccacggaugguguugcugcugggc

SEQ ID NO: 535353 - RNA, 32 nt, Human
uuccauccccaguccagccugggcaaccccac

SEQ ID NO: 535354 - RNA, 32 nt, Human
uuccauccccauggggcagaaacaguggcucc

SEQ ID NO: 535355 - RNA, 32 nt, Human
uuccauccccucucuacauccuucagcuguca

SEQ ID NO: 535356 - RNA, 32 nt, Human
uuccaucccucgggcccagcaguacacacuug

SEQ ID NO: 535357 - RNA, 32 nt, Human
uuccaucccucuguucaguugugaggaccucu

SEQ ID NO: 535358 - RNA, 32 nt, Human
uuccauccguucuccucuggggugaguggagg

SEQ ID NO: 535359 - RNA, 32 nt, Human
uuccauccuguaauccuagcacuuuaaaagga

SEQ ID NO: 535360 - RNA, 32 nt, Human
uuccauccuguauaccuggcucugccuuuuag

SEQ ID NO: 535361 - RNA, 32 nt, Human
uuccaucgugaagccuuuaaucaucuuaccca

SEQ ID NO: 535362 - RNA, 32 nt, Human
uuccaucuaggcucaccucuugcucacucuga

SEQ ID NO: 535363 - RNA, 32 nt, Human
uuccaucuauccuaaccugaccaguacauauu

SEQ ID NO: 535364 - RNA, 32 nt, Human
uuccaucuccacccaucucuacaucugggcac

SEQ ID NO: 535365 - RNA, 32 nt, Human
uuccaucucccuucucccuugucaucagacac

SEQ ID NO: 535366 - RNA, 32 nt, Human
uuccaucucuccccucuugaccuuccacccac

SEQ ID NO: 535367 - RNA, 32 nt, Human
uuccaucucugagauauguggucuugaccucc

SEQ ID NO: 535368 - RNA, 32 nt, Human
uuccaucugcaaaaccaggcucccaggggaug

SEQ ID NO: 535369 - RNA, 16 nt, Human
uuccaucugccugcca

SEQ ID NO: 535370 - RNA, 32 nt, Human
uuccaucugggcaaccugguuuuccaaauauc

SEQ ID NO: 535371 - RNA, 32 nt, Human
uuccaucuggggccaaccccaggcugggccug

SEQ ID NO: 535372 - RNA, 32 nt, Human
uuccaucuguaugccauuguucaugccuuaag

SEQ ID NO: 535373 - RNA, 32 nt, Human
uuccaucugucuuuucuaccugugccaccccu

SEQ ID NO: 535374 - RNA, 32 nt, Human
uuccaucuguuuaguggaugguuggcaggauu

SEQ ID NO: 535375 - RNA, 32 nt, Human
uuccaucuuccagagacaugaagccauuauua

SEQ ID NO: 535376 - RNA, 32 nt, Human
uuccaucuugaaugaaaauacauaucauuuug

SEQ ID NO: 535377 - RNA, 32 nt, Human
uuccaucuugcuggggcucugaagggggucaa

SEQ ID NO: 535378 - RNA, 32 nt, Human
uuccaucuuggaugcuaaucuaccauguugac

SEQ ID NO: 535379 - RNA, 32 nt, Human
uuccaucuuuucucccauuccuccuucuuuau

SEQ ID NO: 535380 - RNA, 32 nt, Human
uuccaugaacaguugaaaaauggaauugacuu

SEQ ID NO: 535381 - RNA, 32 nt, Human
uuccaugaacccaggaugcggagguugcagug

SEQ ID NO: 535382 - RNA, 32 nt, Human
uuccaugaacuccuccuccauuuccuuuuugg

SEQ ID NO: 535383 - RNA, 32 nt, Human
uuccaugaagaaaaauauauguucuuuugaau

SEQ ID NO: 535384 - RNA, 32 nt, Human
uuccaugaauauuacaggcugagaaggagcac

SEQ ID NO: 535385 - RNA, 32 nt, Human
uuccaugacuccaggcugugccucucuccaug

SEQ ID NO: 535386 - RNA, 32 nt, Human
uuccaugagaaggugaccccauaccuugcccu

SEQ ID NO: 535387 - RNA, 32 nt, Human
uuccaugagacaggccagcgugugugggguag

SEQ ID NO: 535388 - RNA, 32 nt, Human
uuccaugagcugagucucugccucugccucuc

SEQ ID NO: 535389 - RNA, 32 nt, Human
uuccaugaggcaggcuugcaggagcaagggag

SEQ ID NO: 535390 - RNA, 32 nt, Human
uuccaugagucuucagaagaaaggacagcuca

SEQ ID NO: 535391 - RNA, 32 nt, Human
uuccaugaucacugggaccuacugccucagga

SEQ ID NO: 535392 - RNA, 20 nt, Human
uuccaugcacucuucaugua

SEQ ID NO: 535393 - RNA, 32 nt, Human
uuccaugcagauuugugcacaugugagagggu

SEQ ID NO: 535394 - RNA, 32 nt, Human
uuccaugccuccaggaguguggcagagcuucu

SEQ ID NO: 535395 - RNA, 32 nt, Human
uuccaugcuacucaucccaaaacuugaucuca

SEQ ID NO: 535396 - RNA, 32 nt, Human
uuccaugcuggccccggcaucugcugugugcu

SEQ ID NO: 535397 - RNA, 32 nt, Human
uuccaugcuguggaggcucuguuguuucgcuc

SEQ ID NO: 535398 - RNA, 32 nt, Human
uuccauggaaacauggcagcuaggacacgggg

SEQ ID NO: 535399 - RNA, 32 nt, Human
uuccauggacgggguggugguggaggaugaaa

SEQ ID NO: 535400 - RNA, 30 nt, Human
uuccauggacuuuccagggcacagucaucu

SEQ ID NO: 535401 - RNA, 31 nt, Human
uuccauggacuuuucuagagauguagacauu

SEQ ID NO: 535402 - RNA, 22 nt, Human
uuccauggagagaagagugauc

SEQ ID NO: 535403 - RNA, 32 nt, Human
uuccauggagccaagagggugcagguuggcag

SEQ ID NO: 535404 - RNA, 32 nt, Human
uuccauggagccagaccggguggaggggcuuc

SEQ ID NO: 535405 - RNA, 32 nt, Human
uuccauggaguaagaaggaagggagcauguac

SEQ ID NO: 535406 - RNA, 32 nt, Human
uuccauggcaggaagaugagaagaaaucuuca

SEQ ID NO: 535407 - RNA, 32 nt, Human
uuccauggccuucugcuguuucucgccaacac

SEQ ID NO: 535408 - RNA, 32 nt, Human
uuccauggccuuuauuucuccucuuccagugg

SEQ ID NO: 535409 - RNA, 32 nt, Human
uuccauggcucuguuaugcaagcacaaauuuc

SEQ ID NO: 535410 - RNA, 32 nt, Human
uuccaugggccacuguuucccuuggggugggg

SEQ ID NO: 535411 - RNA, 32 nt, Human
uuccaugggcuuuccaggucacacgaccuaca

SEQ ID NO: 535412 - RNA, 32 nt, Human
uuccauggggaggaugcugagugagcaguuuc

SEQ ID NO: 535413 - RNA, 32 nt, Human
uuccauggucucaaugacuuaaguuuauggga

SEQ ID NO: 535414 - RNA, 32 nt, Human
uuccauggugcuggccgugugcugcuucuuga

SEQ ID NO: 535415 - RNA, 32 nt, Human
uuccaugguuucagguuuuccuucccuuccuu

SEQ ID NO: 535416 - RNA, 32 nt, Human
uuccauguccccucccagagcugguggaccca

SEQ ID NO: 535417 - RNA, 32 nt, Human
uuccauguccccuuggauguaggaauggucau

SEQ ID NO: 535418 - RNA, 32 nt, Human
uuccaugugcaaggcagguuccagacuucggg

SEQ ID NO: 535419 - RNA, 32 nt, Human
uuccauguggcuuugcccucuguucuucuccu

SEQ ID NO: 535420 - RNA, 32 nt, Human
uuccauguguccacugucuagcacagggcaau

SEQ ID NO: 535421 - RNA, 32 nt, Human
uuccauguugcauuuaugaagggagaagguuc

SEQ ID NO: 535422 - RNA, 32 nt, Human
uuccauguugcccaggcuggucucgaacuccu

SEQ ID NO: 535423 - RNA, 32 nt, Human
uuccauguugcccaggcugguuucgaacucgg

SEQ ID NO: 535424 - RNA, 32 nt, Human
uuccauguuuuaccuauaacaagucuaagaaa

SEQ ID NO: 535425 - RNA, 32 nt, Human
uuccauguuuucuuguuuaucacacauacaag

SEQ ID NO: 535426 - RNA, 32 nt, Human
uuccauguuuuuaaaagauuacuuucuacuuu

SEQ ID NO: 535427 - RNA, 32 nt, Human
uuccauuaauuaacucaggucuggaagacaua

SEQ ID NO: 535428 - RNA, 32 nt, Human
uuccauuacacuccagccugggcaccaggaac

SEQ ID NO: 535429 - RNA, 32 nt, Human
uuccauuacacugugaaugauaccuguuuugu

SEQ ID NO: 535430 - RNA, 17 nt, Human
uuccauuagcaauagcu

SEQ ID NO: 535431 - RNA, 32 nt, Human
uuccauuaggcuccugagaguuauuucucagg

SEQ ID NO: 535432 - RNA, 32 nt, Human
uuccauuaugaugaguaugugcagugauacua

SEQ ID NO: 535433 - RNA, 32 nt, Human
uuccauucacuuugucauuccaccucuaagaa

SEQ ID NO: 535434 - RNA, 32 nt, Human
uuccauucagguaccaucaccuggucccauca

SEQ ID NO: 535435 - RNA, 32 nt, Human
uuccauuccagaauaucugggauucuacuuua

SEQ ID NO: 535436 - RNA, 32 nt, Human
uuccauuccauaucagguacaggauuugaugu

SEQ ID NO: 535437 - RNA, 22 nt, Human
uuccauuccugggccugccucu

SEQ ID NO: 535438 - RNA, 32 nt, Human
uuccauucuaaccuugagccacagugucacuc

SEQ ID NO: 535439 - RNA, 32 nt, Human
uuccauucuauaauaaaacagaaacaagaguc

SEQ ID NO: 535440 - RNA, 24 nt, Human
uuccauucugaacauguuuuguca

SEQ ID NO: 535441 - RNA, 32 nt, Human
uuccauucugcaggaguuuuagcuauuugaga

SEQ ID NO: 535442 - RNA, 32 nt, Human
uuccauucuggcaaaaucuugccuuaucagaa

SEQ ID NO: 535443 - RNA, 32 nt, Human
uuccauucuguggagcugccguuccuaauaau

SEQ ID NO: 535444 - RNA, 32 nt, Human
uuccauucuuuaaggcagacggcauuccucuu

SEQ ID NO: 535445 - RNA, 32 nt, Human
uuccauugaaaggggaaaaaugaagagaaaca

SEQ ID NO: 535446 - RNA, 32 nt, Human
uuccauugcccacuuucuucucccucuccuuu

SEQ ID NO: 535447 - RNA, 32 nt, Human
uuccauugcuagcuguccugcuguuuaacaca

SEQ ID NO: 535448 - RNA, 32 nt, Human
uuccauugcucuauuugucucuccuuaaacua

SEQ ID NO: 535449 - RNA, 32 nt, Human
uuccauuguagccaggcaguuggggcacuuuc

SEQ ID NO: 535450 - RNA, 32 nt, Human
uuccauuuaaggaacagugcaccccaccccag

SEQ ID NO: 535451 - RNA, 32 nt, Human
uuccauuuacaagcaagcaggccaggcaacug

SEQ ID NO: 535452 - RNA, 32 nt, Human
uuccauuuacagucucuuucuuccuuucuaau

SEQ ID NO: 535453 - RNA, 32 nt, Human
uuccauuuaccugaguucgcuuuaaagagcuu

SEQ ID NO: 535454 - RNA, 32 nt, Human
uuccauuuauagaccaccuccagccagugacg

SEQ ID NO: 535455 - RNA, 32 nt, Human
uuccauuucauuuuggccauuauagucacauc

SEQ ID NO: 535456 - RNA, 32 nt, Human
uuccauuuccaguucaucuauggcaguccagc

SEQ ID NO: 535457 - RNA, 32 nt, Human
uuccauuucuccccaccucacucucaccaagu

SEQ ID NO: 535458 - RNA, 32 nt, Human
uuccauuucucucuucagccucaggccaaaca

SEQ ID NO: 535459 - RNA, 32 nt, Human
uuccauuugccucuaugaucuuagcucauaaa

SEQ ID NO: 535460 - RNA, 32 nt, Human
uuccauuugccuuccuggaauccugcugcauc

SEQ ID NO: 535461 - RNA, 32 nt, Human
uuccauuuggcuucucaccugggaaauacaaa

SEQ ID NO: 535462 - RNA, 32 nt, Human
uuccauuuguauucuggcugggugaugagcaa

SEQ ID NO: 535463 - RNA, 32 nt, Human
uuccauuugucaccccagcagaauguccggca

SEQ ID NO: 535464 - RNA, 32 nt, Human
uuccauuuuccaaauuccagcacacagagauc

SEQ ID NO: 535465 - RNA, 31 nt, Human
uuccauuuucucucugggccuguauccaugg

SEQ ID NO: 535466 - RNA, 32 nt, Human
uuccauuuugaacuuugaggacuguuggucag

SEQ ID NO: 535467 - RNA, 31 nt, Human
uuccauuuugagagagaagaaaaacuguuug

SEQ ID NO: 535468 - RNA, 32 nt, Human
uucccaaaaggcaggugcaaugaugcacacuu

SEQ ID NO: 535469 - RNA, 32 nt, Human
uucccaaaaugcugggauuacaagcaugcguc

SEQ ID NO: 535470 - RNA, 32 nt, Human
uucccaaacaaaccaucucuccauuggaaaag

SEQ ID NO: 535471 - RNA, 32 nt, Human
uucccaaacacagucagacucuucccauuguc

SEQ ID NO: 535472 - RNA, 32 nt, Human
uucccaaagggagcagggagaugggaauagaa

SEQ ID NO: 535473 - RNA, 32 nt, Human
uucccaaagggaggguggcagagacagugggc

SEQ ID NO: 535474 - RNA, 32 nt, Human
uucccaaaguccugggauuacaggugugagcc

SEQ ID NO: 535475 - RNA, 32 nt, Human
uucccaaagugcagggauuacaagugugggcc

SEQ ID NO: 535476 - RNA, 32 nt, Human
uucccaaagugcucggauuacaggugugagcc

SEQ ID NO: 535477 - RNA, 32 nt, Human
uucccaaagugcugagauuacaggcaugagcc

SEQ ID NO: 535478 - RNA, 32 nt, Human
uucccaaagugcugagauuacaggcaugagcu

SEQ ID NO: 535479 - RNA, 32 nt, Human
uucccaaagugcugagauuacaggcaugggcc

SEQ ID NO: 535480 - RNA, 32 nt, Human
uucccaaagugcugagauuacaggugugagcc

SEQ ID NO: 535481 - RNA, 32 nt, Human
uucccaaagugcuggaauuacaggccugagcc

SEQ ID NO: 535482 - RNA, 32 nt, Human
uucccaaagugcuggaauuacaggcgugagcc

SEQ ID NO: 535483 - RNA, 32 nt, Human
uucccaaagugcuggcauuacaggcgugagcc

SEQ ID NO: 535484 - RNA, 32 nt, Human
uucccaaagugcugggaauacaggugugaacc

SEQ ID NO: 535485 - RNA, 32 nt, Human
uucccaaagugcugggauuacagacaugagcc

SEQ ID NO: 535486 - RNA, 32 nt, Human
uucccaaagugcugggauuacaggaaugagcc

SEQ ID NO: 535487 - RNA, 32 nt, Human
uucccaaagugcugggauuacaggcaugagcc

SEQ ID NO: 535488 - RNA, 32 nt, Human
uucccaaagugcugggauuacaggcgggagcc

SEQ ID NO: 535489 - RNA, 32 nt, Human
uucccaaagugcugggauuacaggcgugagcc

SEQ ID NO: 535490 - RNA, 32 nt, Human
uucccaaagugcugggauuacaggcgugcacc

SEQ ID NO: 535491 - RNA, 32 nt, Human
uucccaaagugcugggauuacaggcuugagcc

SEQ ID NO: 535492 - RNA, 32 nt, Human
uucccaaagugcugggauuacaggugugagcc

SEQ ID NO: 535493 - RNA, 32 nt, Human
uucccaaagugcugggauuacaggugugaguc

SEQ ID NO: 535494 - RNA, 32 nt, Human
uucccaaagugcugggauuacgggcgugagcc

SEQ ID NO: 535495 - RNA, 32 nt, Human
uucccaaagugcugggauuauaggcagcacua

SEQ ID NO: 535496 - RNA, 32 nt, Human
uucccaaagugcugggauuauaggcaugugcc

SEQ ID NO: 535497 - RNA, 32 nt, Human
uucccaaagugcugggauuaugggcgggugug

SEQ ID NO: 535498 - RNA, 32 nt, Human
uucccaaagugcugggauugcaggcgugagcc

SEQ ID NO: 535499 - RNA, 32 nt, Human
uucccaaaguguugggauuacaggcaugagcu

SEQ ID NO: 535500 - RNA, 32 nt, Human
uucccaaaguucugggauuacaggcaugagcc

SEQ ID NO: 535501 - RNA, 32 nt, Human
uucccaaauccuuccuuccucccagcaccccu

SEQ ID NO: 535502 - RNA, 32 nt, Human
uucccaaaucuaguggaggacagggcaaggga

SEQ ID NO: 535503 - RNA, 18 nt, Human
uucccaaaucugcuccag

SEQ ID NO: 535504 - RNA, 32 nt, Human
uucccaaaugcaggcagaucugagaggggcuc

SEQ ID NO: 535505 - RNA, 32 nt, Human
uucccaaauguagacuagaaucugcaggaugc

SEQ ID NO: 535506 - RNA, 32 nt, Human
uucccaaaugugccacuuuucuguuggcucac

SEQ ID NO: 535507 - RNA, 32 nt, Human
uucccaacagcaguugggguguccuguugauu

SEQ ID NO: 535508 - RNA, 32 nt, Human
uucccaacauggugaaaccccaucucuacuaa

SEQ ID NO: 535509 - RNA, 25 nt, Human
uucccaaccuccugugggccucaag

SEQ ID NO: 535510 - RNA, 32 nt, Human
uucccaaccugucccaguuugucugggaucaa

SEQ ID NO: 535511 - RNA, 32 nt, Human
uucccaacuuguccggaaguguuuccagaaua

SEQ ID NO: 535512 - RNA, 32 nt, Human
uucccaagaggagccaucccacauuuggguag

SEQ ID NO: 535513 - RNA, 24 nt, Human
uucccaagcagcugggauuacagg

SEQ ID NO: 535514 - RNA, 30 nt, Human
uucccaagccacugcacuucggaggggcug

SEQ ID NO: 535515 - RNA, 32 nt, Human
uucccaagcuguuuguucuccacaauaggcuc

SEQ ID NO: 535516 - RNA, 23 nt, Human
uucccaagcuucucaaacuguua

SEQ ID NO: 535517 - RNA, 32 nt, Human
uucccaaggucacacagcccagaagagauggg

SEQ ID NO: 535518 - RNA, 32 nt, Human
uucccaaggugcuggaauuacaggcgugagcc

SEQ ID NO: 535519 - RNA, 32 nt, Human
uucccaaguagcggggaucacaggcaugagcc

SEQ ID NO: 535520 - RNA, 32 nt, Human
uucccaaguagcugagauuacaggcgcacacc

SEQ ID NO: 535521 - RNA, 32 nt, Human
uucccaaguagcugcaacaacaggcacacacc

SEQ ID NO: 535522 - RNA, 24 nt, Human
uucccaaguagcugggauuacagg

SEQ ID NO: 535523 - RNA, 32 nt, Human
uucccaaguagcugggauuacaggcacccacc

SEQ ID NO: 535524 - RNA, 32 nt, Human
uucccaaguagcugggauuacaggcacgugcc

SEQ ID NO: 535525 - RNA, 32 nt, Human
uucccaaguagcugggauuacaggcguacgcc

SEQ ID NO: 535526 - RNA, 32 nt, Human
uucccaaguagcugggauuuacaggugugcac

SEQ ID NO: 535527 - RNA, 32 nt, Human
uucccaaguaguugggauuacaggcgccugcc

SEQ ID NO: 535528 - RNA, 32 nt, Human
uucccaaguccaggaagagaaauguaagauuc

SEQ ID NO: 535529 - RNA, 32 nt, Human
uucccaaguccaugcuuuaaaggguuugcaag

SEQ ID NO: 535530 - RNA, 32 nt, Human
uucccaagugccugaucauaccucccagucuc

SEQ ID NO: 535531 - RNA, 24 nt, Human
uucccaaguggcugggauuacagg

SEQ ID NO: 535532 - RNA, 32 nt, Human
uucccaaguggcugggauuacaggcaugugcc

SEQ ID NO: 535533 - RNA, 32 nt, Human
uucccaaguggcugggauuacaggcgcccacc

SEQ ID NO: 535534 - RNA, 20 nt, Human
uucccaaguucgaaaaagaa

SEQ ID NO: 535535 - RNA, 32 nt, Human
uucccaaguugaagccuagacuucuggcucaa

SEQ ID NO: 535536 - RNA, 27 nt, Human
uucccaauaaagcgugcucuuucacaa

SEQ ID NO: 535537 - RNA, 32 nt, Human
uucccaaucagcacugaaaauaccaucaggcc

SEQ ID NO: 535538 - RNA, 32 nt, Human
uucccaauuaggaauucaauguggaaaacaua

SEQ ID NO: 535539 - RNA, 32 nt, Human
uucccacaaaccucaacaugugccagucaccc

SEQ ID NO: 535540 - RNA, 22 nt, Human
uucccacaaaggaaguaaccuu

SEQ ID NO: 535541 - RNA, 32 nt, Human
uucccacacagcugguagcucauucuggaaag

SEQ ID NO: 535542 - RNA, 32 nt, Human
uucccacacaugcagacauguacacacgugca

SEQ ID NO: 535543 - RNA, 32 nt, Human
uucccacaccuguaaucucagcacuuuaggag

SEQ ID NO: 535544 - RNA, 32 nt, Human
uucccacacucgugcauacacacacauccaua

SEQ ID NO: 535545 - RNA, 32 nt, Human
uucccacagccaaagccccauccccuucauuu

SEQ ID NO: 535546 - RNA, 32 nt, Human
uucccacagcuugccccacaccaccuucacac

SEQ ID NO: 535547 - RNA, 32 nt, Human
uucccacagguucuggaggagcccaggaugga

SEQ ID NO: 535548 - RNA, 32 nt, Human
uucccacaguggcuucacagacccacaagaga

SEQ ID NO: 535549 - RNA, 32 nt, Human
uucccacauacaccugagccacuguggugggu

SEQ ID NO: 535550 - RNA, 18 nt, Human
uucccacauccugagaaa

SEQ ID NO: 535551 - RNA, 32 nt, Human
uucccacaucuuccugucuucuucugagccuu

SEQ ID NO: 535552 - RNA, 32 nt, Human
uucccaccaaccagcucccaaacagaaagugu

SEQ ID NO: 535553 - RNA, 32 nt, Human
uucccaccaaggucuucagccaucaacaagag

SEQ ID NO: 535554 - RNA, 23 nt, Human
uucccaccacagacuggcuugua

SEQ ID NO: 535555 - RNA, 32 nt, Human
uucccaccacuucccaggcucugacagccgag

SEQ ID NO: 535556 - RNA, 32 nt, Human
uucccaccaggcaauuuggacugucuuugaau

SEQ ID NO: 535557 - RNA, 32 nt, Human
uucccacccaagcuuccggcagccuggcucca

SEQ ID NO: 535558 - RNA, 19 nt, Human
uucccacccacagccccca

SEQ ID NO: 535559 - RNA, 32 nt, Human
uucccacccagccuggcuggcggugcccacag

SEQ ID NO: 535560 - RNA, 32 nt, Human
uucccacccagcugcgcccucggcucggucuc

SEQ ID NO: 535561 - RNA, 32 nt, Human
uucccacccccugccugcccagccugggcccu

SEQ ID NO: 535562 - RNA, 32 nt, Human
uucccaccccuauacccuaggucuccaccccu

SEQ ID NO: 535563 - RNA, 32 nt, Human
uucccaccccuuagucuuuccccaccgagucc

SEQ ID NO: 535564 - RNA, 32 nt, Human
uucccaccgagccgagcuuacugugagugugg

SEQ ID NO: 535565 - RNA, 32 nt, Human
uucccaccgcaucguccgccucagccagaacc

SEQ ID NO: 535566 - RNA, 23 nt, Human
uucccaccuuccauagccuccaa

SEQ ID NO: 535567 - RNA, 32 nt, Human
uucccaccuuuuccuuuuucuucuuucuuguc

SEQ ID NO: 535568 - RNA, 32 nt, Human
uucccacuaaguugugugugaggaaauccuca

SEQ ID NO: 535569 - RNA, 32 nt, Human
uucccacucacggauaagacaccaagacguag

SEQ ID NO: 535570 - RNA, 32 nt, Human
uucccacucccccauuccucuggucucuuuuc

SEQ ID NO: 535571 - RNA, 32 nt, Human
uucccacucccuacuucugccaccccaccaac

SEQ ID NO: 535572 - RNA, 22 nt, Human
uucccacucccuuggguugcug

SEQ ID NO: 535573 - RNA, 32 nt, Human
uucccacucucauuaauccaucauguuccuaa

SEQ ID NO: 535574 - RNA, 19 nt, Human
uucccacucuuucgugguu

SEQ ID NO: 535575 - RNA, 32 nt, Human
uucccacugauccuucugggccacguugugcg

SEQ ID NO: 535576 - RNA, 32 nt, Human
uucccacugcacuccagccugagugacagagc

SEQ ID NO: 535577 - RNA, 32 nt, Human
uucccacugcacuccagccuggccaauaagac

SEQ ID NO: 535578 - RNA, 32 nt, Human
uucccacugcugucccugggccucugcccuug

SEQ ID NO: 535579 - RNA, 32 nt, Human
uucccacuggggacacagacacaggaaguagc

SEQ ID NO: 535580 - RNA, 32 nt, Human
uucccacugucauuccuaaccugggauuucua

SEQ ID NO: 535581 - RNA, 32 nt, Human
uucccagaaccagcggcccccuuuguaagaug

SEQ ID NO: 535582 - RNA, 28 nt, Human
uucccagaagcugcugccucuuccugag

SEQ ID NO: 535583 - RNA, 32 nt, Human
uucccagaagugagacugcuggauuauaugcu

SEQ ID NO: 535584 - RNA, 32 nt, Human
uucccagaaguuggacgaagaggcucaggcgu

SEQ ID NO: 535585 - RNA, 32 nt, Human
uucccagaauccauuccauuugugauuccaug

SEQ ID NO: 535586 - RNA, 32 nt, Human
uucccagaccugcuuccagucuuuauugcuuu

SEQ ID NO: 535587 - RNA, 19 nt, Human
uucccagaccuggcugucu

SEQ ID NO: 535588 - RNA, 32 nt, Human
uucccagacgaaaacucacgcccuugcccuaa

SEQ ID NO: 535589 - RNA, 32 nt, Human
uucccagacuccaagcuccuggcuccuguguu

SEQ ID NO: 535590 - RNA, 32 nt, Human
uucccagacucugccuccugguuuccuuucuc

SEQ ID NO: 535591 - RNA, 32 nt, Human
uucccagagaaaaguccaauagcuggugggaa

SEQ ID NO: 535592 - RNA, 32 nt, Human
uucccagagcagcacccacaaaagcaagcauu

SEQ ID NO: 535593 - RNA, 32 nt, Human
uucccagagcaucuugcauccaaaccuguaac

SEQ ID NO: 535594 - RNA, 32 nt, Human
uucccagagcccagggucgugauauauacauc

SEQ ID NO: 535595 - RNA, 32 nt, Human
uucccagaggcggggaggucucaggggucugu

SEQ ID NO: 535596 - RNA, 32 nt, Human
uucccagagggugcaggagccagcucugacua

SEQ ID NO: 535597 - RNA, 32 nt, Human
uucccagagugcugggauuacaggcgugagcc

SEQ ID NO: 535598 - RNA, 32 nt, Human
uucccagcaaccuggggcugguucccagugcc

SEQ ID NO: 535599 - RNA, 32 nt, Human
uucccagcagugggggucagacgcccuuccuc

SEQ ID NO: 535600 - RNA, 32 nt, Human
uucccagcaucagccuuagaacaagaaccuua

SEQ ID NO: 535601 - RNA, 32 nt, Human
uucccagccagggacauggagcagggcaccug

SEQ ID NO: 535602 - RNA, 32 nt, Human
uucccagcccaccagccugacgcccagccagg

SEQ ID NO: 535603 - RNA, 32 nt, Human
uucccagcccaggagcugaggggugagggcug

SEQ ID NO: 535604 - RNA, 32 nt, Human
uucccagcccucaaaacuaacauaucuuccag

SEQ ID NO: 535605 - RNA, 32 nt, Human
uucccagcccucaaggagcuacgugccaagga

SEQ ID NO: 535606 - RNA, 32 nt, Human
uucccagcccugggaggaagggggagucauuu

SEQ ID NO: 535607 - RNA, 32 nt, Human
uucccagccgcacacuuccucccuccagccgu

SEQ ID NO: 535608 - RNA, 32 nt, Human
uucccagccucaccaccccuucucaguaauga

SEQ ID NO: 535609 - RNA, 32 nt, Human
uucccagccuccagaacuaugggaaaauaaau

SEQ ID NO: 535610 - RNA, 32 nt, Human
uucccagccuccagaacucugggaaaauaaag

SEQ ID NO: 535611 - RNA, 32 nt, Human
uucccagccuccagaacugugagaaagaaauc

SEQ ID NO: 535612 - RNA, 32 nt, Human
uucccagccuccagaacugugagaaauaaauu

SEQ ID NO: 535613 - RNA, 32 nt, Human
uucccagccuccagaauugugagaaauaaauu

SEQ ID NO: 535614 - RNA, 32 nt, Human
uucccagccuccagagaugugaggaauacauc

SEQ ID NO: 535615 - RNA, 32 nt, Human
uucccagccuccagagcuguaagaaaauaaau

SEQ ID NO: 535616 - RNA, 32 nt, Human
uucccagccucgcugguaguccuggucaagga

SEQ ID NO: 535617 - RNA, 32 nt, Human
uucccagccucuuuuacuagucuuucaggagg

SEQ ID NO: 535618 - RNA, 32 nt, Human
uucccagccugucauaauggccaccuugcaga

SEQ ID NO: 535619 - RNA, 32 nt, Human
uucccagccuuccuccugaccccuuccaacag

SEQ ID NO: 535620 - RNA, 32 nt, Human
uucccagcgugaaaagagagacugcgcggccg

SEQ ID NO: 535621 - RNA, 31 nt, Human
uucccagcuacucaggagguugaggugggag

SEQ ID NO: 535622 - RNA, 19 nt, Human
uucccagcuacugcagcuu

SEQ ID NO: 535623 - RNA, 31 nt, Human
uucccagcuacuugggagguugagggaggag

SEQ ID NO: 535624 - RNA, 32 nt, Human
uucccagcuagaccugugugagaggugucugg

SEQ ID NO: 535625 - RNA, 32 nt, Human
uucccagcuaucuccccugcuccucugcuggu

SEQ ID NO: 535626 - RNA, 32 nt, Human
uucccagcucaagugauccuccuaccucagcc

SEQ ID NO: 535627 - RNA, 32 nt, Human
uucccagcucagaacauauacugaauggaaug

SEQ ID NO: 535628 - RNA, 32 nt, Human
uucccagcucagcucaguaccucagccaccuc

SEQ ID NO: 535629 - RNA, 32 nt, Human
uucccagcucccaagcccuguggcacccgcag

SEQ ID NO: 535630 - RNA, 21 nt, Human
uucccagcuccuggccucaca

SEQ ID NO: 535631 - RNA, 21 nt, Human
uucccagcucugaucuccaca

SEQ ID NO: 535632 - RNA, 32 nt, Human
uucccagcucuggcugaccauuuuguucccug

SEQ ID NO: 535633 - RNA, 32 nt, Human
uucccagcugcuguaacggagccaccuccaac

SEQ ID NO: 535634 - RNA, 32 nt, Human
uucccagcugcuuccugcucagcugggccacc

SEQ ID NO: 535635 - RNA, 32 nt, Human
uucccagcuuugauucagaagguacuaguuau

SEQ ID NO: 535636 - RNA, 32 nt, Human
uucccaggaaaccaucuauagagauuugcauu

SEQ ID NO: 535637 - RNA, 32 nt, Human
uucccaggacagcuccaggaucgagaucacug

SEQ ID NO: 535638 - RNA, 22 nt, Human
uucccaggacugcccaaugaca

SEQ ID NO: 535639 - RNA, 32 nt, Human
uucccaggagacugggcugggaacaggaaggg

SEQ ID NO: 535640 - RNA, 32 nt, Human
uucccaggagccaagcagaugucaguaccaug

SEQ ID NO: 535641 - RNA, 22 nt, Human
uucccaggagggagaaagagaa

SEQ ID NO: 535642 - RNA, 18 nt, Human
uucccaggaucugcucca

SEQ ID NO: 535643 - RNA, 32 nt, Human
uucccaggcacccuccuuucugccccagagga

SEQ ID NO: 535644 - RNA, 32 nt, Human
uucccaggcauacacuuccacugccuucagcu

SEQ ID NO: 535645 - RNA, 32 nt, Human
uucccaggccucucuggccacugcuuuguauc

SEQ ID NO: 535646 - RNA, 32 nt, Human
uucccaggcuaaaucacuuaccucccaccccc

SEQ ID NO: 535647 - RNA, 32 nt, Human
uucccaggcucaggcucaggugauccucacac

SEQ ID NO: 535648 - RNA, 32 nt, Human
uucccaggcugaggacaaacccaggacugcuc

SEQ ID NO: 535649 - RNA, 21 nt, Human
uucccaggcuggagugcaaug

SEQ ID NO: 535650 - RNA, 22 nt, Human
uucccaggcuggagugcagugg

SEQ ID NO: 535651 - RNA, 32 nt, Human
uucccagggaucucuucucuccccuucaccau

SEQ ID NO: 535652 - RNA, 32 nt, Human
uucccagggcccugauuuucagcacggaugau

SEQ ID NO: 535653 - RNA, 32 nt, Human
uucccagggcuggagcagguguacccugagca

SEQ ID NO: 535654 - RNA, 32 nt, Human
uucccagggcuuugcccucugugucuuagcag

SEQ ID NO: 535655 - RNA, 21 nt, Human
uucccaggggauugaacagaa

SEQ ID NO: 535656 - RNA, 32 nt, Human
uucccagggggcagaggcaggggcgggagggg

SEQ ID NO: 535657 - RNA, 32 nt, Human
uucccaggguggcgccugcucuccauccaggc

SEQ ID NO: 535658 - RNA, 32 nt, Human
uucccagguacccugcaugcauauagcugcug

SEQ ID NO: 535659 - RNA, 32 nt, Human
uucccagguagcugggauuacaggcaugugcc

SEQ ID NO: 535660 - RNA, 32 nt, Human
uucccaggugucccuaauuugagaaguaaccu

SEQ ID NO: 535661 - RNA, 32 nt, Human
uucccagguuugagcucugcagccucucuccu

SEQ ID NO: 535662 - RNA, 16 nt, Human
uucccaguccacuucu

SEQ ID NO: 535663 - RNA, 18 nt, Human
uucccaguccucuggacu

SEQ ID NO: 535664 - RNA, 32 nt, Human
uucccagucguaugccagcuuggagagucacg

SEQ ID NO: 535665 - RNA, 32 nt, Human
uucccagucugcuugucucccuuucccuugca

SEQ ID NO: 535666 - RNA, 19 nt, Human
uucccagugccuggccgaa

SEQ ID NO: 535667 - RNA, 32 nt, Human
uucccaguggccuucccaccaggaggaaagcc

SEQ ID NO: 535668 - RNA, 32 nt, Human
uucccaguguggcucccagagcuuugaccaga

SEQ ID NO: 535669 - RNA, 32 nt, Human
uucccaguguucugccgcuccuguggccaugu

SEQ ID NO: 535670 - RNA, 32 nt, Human
uucccaguuacaccaggcauccuggcccaaag

SEQ ID NO: 535671 - RNA, 32 nt, Human
uucccaguuccuucccgggccccacacgcugc

SEQ ID NO: 535672 - RNA, 32 nt, Human
uucccaguucugacauucacagcaugaccuag

SEQ ID NO: 535673 - RNA, 32 nt, Human
uucccaguugcugucccuggguccccucuuuc

SEQ ID NO: 535674 - RNA, 32 nt, Human
uucccaguuucuccaagcugcuucuggaaugc

SEQ ID NO: 535675 - RNA, 21 nt, Human
uucccauaauagcuuccagua

SEQ ID NO: 535676 - RNA, 32 nt, Human
uucccauagagaaacccugacuggccgcugag

SEQ ID NO: 535677 - RNA, 32 nt, Human
uucccauauauuucagggucucuguguauuaa

SEQ ID NO: 535678 - RNA, 32 nt, Human
uucccaucacucuuuacaugguggugaugucc

SEQ ID NO: 535679 - RNA, 32 nt, Human
uucccaucaggacugaaggaccuaguccccca

SEQ ID NO: 535680 - RNA, 32 nt, Human
uucccaucagguuaaagacuucaucuagauga

SEQ ID NO: 535681 - RNA, 32 nt, Human
uucccaucaugggaacagugguucuuccccag

SEQ ID NO: 535682 - RNA, 32 nt, Human
uucccaucccacugcucccccaacacaaaccc

SEQ ID NO: 535683 - RNA, 32 nt, Human
uucccauccgcaccagcaagagggccccugug

SEQ ID NO: 535684 - RNA, 32 nt, Human
uucccauccuccagggucucccaaaccagcca

SEQ ID NO: 535685 - RNA, 32 nt, Human
uucccauccugaucccucucccaccagacugg

SEQ ID NO: 535686 - RNA, 32 nt, Human
uucccauccugucacuugcagcagaaacuauu

SEQ ID NO: 535687 - RNA, 32 nt, Human
uucccaucgagucucuggucucugccuucagg

SEQ ID NO: 535688 - RNA, 32 nt, Human
uucccaucggaggugguuggugcagauggaag

SEQ ID NO: 535689 - RNA, 32 nt, Human
uucccaucuacugaaacagggucuccacaaga

SEQ ID NO: 535690 - RNA, 32 nt, Human
uucccaucucauuccaggggcccagagcagca

SEQ ID NO: 535691 - RNA, 32 nt, Human
uucccaucuccaaaaauccagagacauuacga

SEQ ID NO: 535692 - RNA, 32 nt, Human
uucccaucuccauggcaacccaaccaaaccaa

SEQ ID NO: 535693 - RNA, 32 nt, Human
uucccaucucucucugugcccuuagccugcug

SEQ ID NO: 535694 - RNA, 32 nt, Human
uucccaucuuugucucuagccuggagaagagc

SEQ ID NO: 535695 - RNA, 32 nt, Human
uucccaugaaaguuaguaagaugcccuuuuaa

SEQ ID NO: 535696 - RNA, 32 nt, Human
uucccaugaacuggaaagcucaccuccacugc

SEQ ID NO: 535697 - RNA, 32 nt, Human
uucccaugacgcauggcaacacuggauucagu

SEQ ID NO: 535698 - RNA, 32 nt, Human
uucccaugacugcacccagcuccaggggcccu

SEQ ID NO: 535699 - RNA, 30 nt, Human
uucccaugcaaacuguagggcgcuuacagc

SEQ ID NO: 535700 - RNA, 32 nt, Human
uucccaugcauucucuuuccccgggaaaguug

SEQ ID NO: 535701 - RNA, 32 nt, Human
uucccaugcuaagcugagucugugccauagca

SEQ ID NO: 535702 - RNA, 32 nt, Human
uucccauggauaggcgugugacccugguugag

SEQ ID NO: 535703 - RNA, 32 nt, Human
uucccauggcaauuuaaccacauuuggaaggc

SEQ ID NO: 535704 - RNA, 23 nt, Human
uucccauggccuccaggccucua

SEQ ID NO: 535705 - RNA, 32 nt, Human
uucccauggcugcuucauuuguuguucauuuc

SEQ ID NO: 535706 - RNA, 32 nt, Human
uucccauggguggagguggcccagguggucaa

SEQ ID NO: 535707 - RNA, 21 nt, Human
uucccauguccuucuggucuc

SEQ ID NO: 535708 - RNA, 32 nt, Human
uucccaugugaacaagugacccugcuauauuu

SEQ ID NO: 535709 - RNA, 32 nt, Human
uucccauuacgacccuccucuggucauggucc

SEQ ID NO: 535710 - RNA, 32 nt, Human
uucccauuagauucuccacacaaaaagcccua

SEQ ID NO: 535711 - RNA, 32 nt, Human
uucccauuguaaggcuggagcugaaauagucu

SEQ ID NO: 535712 - RNA, 32 nt, Human
uucccauuguuuuaacagcuguguggcugacu

SEQ ID NO: 535713 - RNA, 32 nt, Human
uucccauuugaaauugcuggcgcugcuggccg

SEQ ID NO: 535714 - RNA, 32 nt, Human
uucccauuugacugaugcaugcuaaaguguga

SEQ ID NO: 535715 - RNA, 32 nt, Human
uuccccaaaucuuggcugggcacgguggcuca

SEQ ID NO: 535716 - RNA, 24 nt, Human
uuccccaacacuuccuucccaaca

SEQ ID NO: 535717 - RNA, 32 nt, Human
uuccccaaccacggcccagcccugccacaccc

SEQ ID NO: 535718 - RNA, 32 nt, Human
uuccccaaccucucaguggugagcaggcuuug

SEQ ID NO: 535719 - RNA, 32 nt, Human
uuccccaagcauccagccuggggaugggcccc

SEQ ID NO: 535720 - RNA, 32 nt, Human
uuccccaaggggaaagacuggcuuuguaauua

SEQ ID NO: 535721 - RNA, 32 nt, Human
uuccccaagugcugggauuacaggugugagcc

SEQ ID NO: 535722 - RNA, 32 nt, Human
uuccccaaucccccuucucuucuuccagauua

SEQ ID NO: 535723 - RNA, 32 nt, Human
uuccccaaucccggcccugcugugcugcugcc

SEQ ID NO: 535724 - RNA, 24 nt, Human
uuccccaaucgaugcucucagggu

SEQ ID NO: 535725 - RNA, 22 nt, Human
uuccccaaugcuccaucccaac

SEQ ID NO: 535726 - RNA, 32 nt, Human
uuccccacaagcccccuccaacccccaccccc

SEQ ID NO: 535727 - RNA, 32 nt, Human
uuccccaccaccuccuuagccuggugugagaa

SEQ ID NO: 535728 - RNA, 32 nt, Human
uuccccacccaccccuuccucagcacucugug

SEQ ID NO: 535729 - RNA, 32 nt, Human
uuccccaccccuauuguauuuucuugaacacc

SEQ ID NO: 535730 - RNA, 32 nt, Human
uuccccaccucaccaucucccagacccucuuc

SEQ ID NO: 535731 - RNA, 32 nt, Human
uuccccaccuucagcauaacaggauuuaguaa

SEQ ID NO: 535732 - RNA, 32 nt, Human
uuccccacucacugcagagcugcugccugcca

SEQ ID NO: 535733 - RNA, 32 nt, Human
uuccccacuccccaggccucugaccccaucuc

SEQ ID NO: 535734 - RNA, 32 nt, Human
uuccccacuccguacuguauuuugccauucug

SEQ ID NO: 535735 - RNA, 32 nt, Human
uuccccacuggcacagugggaagcugggauaa

SEQ ID NO: 535736 - RNA, 32 nt, Human
uuccccacuucauuccacccagucucccuccc

SEQ ID NO: 535737 - RNA, 32 nt, Human
uuccccagaauccgcauguuuccccagugauu

SEQ ID NO: 535738 - RNA, 32 nt, Human
uuccccagacacauucuccugugccccucaga

SEQ ID NO: 535739 - RNA, 32 nt, Human
uuccccagauugcaacaggcugggcuucagug

SEQ ID NO: 535740 - RNA, 32 nt, Human
uuccccagauuguuaagaguucacugaagaua

SEQ ID NO: 535741 - RNA, 32 nt, Human
uuccccagcaacaccccuccccgacacaggca

SEQ ID NO: 535742 - RNA, 32 nt, Human
uuccccagcagcugggacuacaggcacgcgcc

SEQ ID NO: 535743 - RNA, 32 nt, Human
uuccccagccacugcugcucauucaaacuucu

SEQ ID NO: 535744 - RNA, 32 nt, Human
uuccccagccucccaccgccccauuugagaua

SEQ ID NO: 535745 - RNA, 32 nt, Human
uuccccagccuccccacugcucccuccucugu

SEQ ID NO: 535746 - RNA, 32 nt, Human
uuccccagcuacuuggaaggcugagaugggaa

SEQ ID NO: 535747 - RNA, 32 nt, Human
uuccccagcuaguaggugacagagcccagauu

SEQ ID NO: 535748 - RNA, 32 nt, Human
uuccccagcuggccuggacugccugugcucug

SEQ ID NO: 535749 - RNA, 32 nt, Human
uuccccaggacuccccucacacaugcacuucc

SEQ ID NO: 535750 - RNA, 22 nt, Human
uuccccaggccggagugcagug

SEQ ID NO: 535751 - RNA, 32 nt, Human
uuccccaggccggagugcagugguacgaucac

SEQ ID NO: 535752 - RNA, 32 nt, Human
uuccccaggcuggacgugguggcucacgccug

SEQ ID NO: 535753 - RNA, 22 nt, Human
uuccccaggcuggagugcaaug

SEQ ID NO: 535754 - RNA, 32 nt, Human
uuccccaggcuggagugcaauggcacgaucuc

SEQ ID NO: 535755 - RNA, 32 nt, Human
uuccccagugagcgcccugccugccuaugcau

SEQ ID NO: 535756 - RNA, 32 nt, Human
uuccccagugggcaugaaagaaaugagggccc

SEQ ID NO: 535757 - RNA, 32 nt, Human
uuccccagugucugaggccacagccaucccuu

SEQ ID NO: 535758 - RNA, 32 nt, Human
uuccccauccacccuccuagcucugcucucag

SEQ ID NO: 535759 - RNA, 32 nt, Human
uuccccauccccaguaguuuacauuccugacu

SEQ ID NO: 535760 - RNA, 32 nt, Human
uuccccaucccccaugcucuugcgugugcuug

SEQ ID NO: 535761 - RNA, 32 nt, Human
uuccccauccucaagcaggagccccagucccc

SEQ ID NO: 535762 - RNA, 32 nt, Human
uuccccaucuaaggaacagauguggucguucc

SEQ ID NO: 535763 - RNA, 32 nt, Human
uuccccaucugcaaaaugaggagggucauagu

SEQ ID NO: 535764 - RNA, 32 nt, Human
uuccccaucugcaaaaugggggugacgauauc

SEQ ID NO: 535765 - RNA, 32 nt, Human
uuccccaucuucuccucuauucuggucucccc

SEQ ID NO: 535766 - RNA, 32 nt, Human
uuccccaucuucuucucucggucccgggagcc

SEQ ID NO: 535767 - RNA, 32 nt, Human
uuccccaugaagaaccagacagcuagaguguc

SEQ ID NO: 535768 - RNA, 32 nt, Human
uuccccaugucauccaggcuggucuggaacuc

SEQ ID NO: 535769 - RNA, 24 nt, Human
uuccccaugucuuucuggcugucu

SEQ ID NO: 535770 - RNA, 32 nt, Human
uuccccauuaaacugggugccuggugaggaca

SEQ ID NO: 535771 - RNA, 32 nt, Human
uuccccauucguucuccggggagggagggacu

SEQ ID NO: 535772 - RNA, 32 nt, Human
uucccccaaagacaggagguguggcugauggg

SEQ ID NO: 535773 - RNA, 32 nt, Human
uucccccaagccugccccucugccucauuuuc

SEQ ID NO: 535774 - RNA, 32 nt, Human
uucccccaauguuugaaagaggcauuaggcuc

SEQ ID NO: 535775 - RNA, 32 nt, Human
uucccccacagcuaucuucacucucugccuuc

SEQ ID NO: 535776 - RNA, 32 nt, Human
uucccccaccccauuucucuccucacacacag

SEQ ID NO: 535777 - RNA, 32 nt, Human
uucccccaccgcaaccuccaucucccggguuc

SEQ ID NO: 535778 - RNA, 32 nt, Human
uucccccacuacugcagcaccuccaggccugu

SEQ ID NO: 535779 - RNA, 32 nt, Human
uucccccacucccauucccuggccucugccau

SEQ ID NO: 535780 - RNA, 19 nt, Human
uucccccacuccccacuga

SEQ ID NO: 535781 - RNA, 32 nt, Human
uucccccacugccccagcucugacuggacccc

SEQ ID NO: 535782 - RNA, 32 nt, Human
uucccccacuggcugcucuacugcuuccccuc

SEQ ID NO: 535783 - RNA, 32 nt, Human
uucccccagaaauuacucaaugcugaaaccuc

SEQ ID NO: 535784 - RNA, 32 nt, Human
uucccccagacuccuggaguucuagucaauuc

SEQ ID NO: 535785 - RNA, 32 nt, Human
uucccccagcacccaggagagccuugcugugu

SEQ ID NO: 535786 - RNA, 32 nt, Human
uucccccagccgggcuggaggcugugcagaag

SEQ ID NO: 535787 - RNA, 32 nt, Human
uucccccagcuaugaggccgaggcgggcuggc

SEQ ID NO: 535788 - RNA, 32 nt, Human
uucccccaggagaauuuuuagucuucuuucau

SEQ ID NO: 535789 - RNA, 22 nt, Human
uucccccagucccucccucuuc

SEQ ID NO: 535790 - RNA, 19 nt, Human
uucccccaucccccacugg

SEQ ID NO: 535791 - RNA, 32 nt, Human
uucccccaucuggugaugcuugagugcacaga

SEQ ID NO: 535792 - RNA, 22 nt, Human
uucccccaucuucaucccaaca

SEQ ID NO: 535793 - RNA, 32 nt, Human
uucccccaugcuguucugauagugagugaguu

SEQ ID NO: 535794 - RNA, 20 nt, Human
uuccccccagucaguauuac

SEQ ID NO: 535795 - RNA, 32 nt, Human
uucccccgcaggccgggcaugggugggggcgc

SEQ ID NO: 535796 - RNA, 32 nt, Human
uucccccgcgccgccuccccgcgccgcucgga

SEQ ID NO: 535797 - RNA, 32 nt, Human
uucccccgcugguuccaccaagcacagucaag

SEQ ID NO: 535798 - RNA, 32 nt, Human
uucccccggggccaugcugccugcagccacag

SEQ ID NO: 535799 - RNA, 32 nt, Human
uucccccuacuucuaauuugcugaaugaagaa

SEQ ID NO: 535800 - RNA, 32 nt, Human
uucccccuaucauuccuuuacagugccuagug

SEQ ID NO: 535801 - RNA, 32 nt, Human
uucccccucacugcaguugucugcauuuuuag

SEQ ID NO: 535802 - RNA, 32 nt, Human
uucccccucccaggccuccugggugucacccc

SEQ ID NO: 535803 - RNA, 32 nt, Human
uucccccucccucauccucccaucccaguaaa

SEQ ID NO: 535804 - RNA, 32 nt, Human
uucccccuccuccccuccuuucuguccucucu

SEQ ID NO: 535805 - RNA, 24 nt, Human
uucccccucucaugguaggccagg

SEQ ID NO: 535806 - RNA, 32 nt, Human
uucccccucucccuccccaauggcuguguagc

SEQ ID NO: 535807 - RNA, 32 nt, Human
uucccccucugcuaugccuuagggaagaugac

SEQ ID NO: 535808 - RNA, 32 nt, Human
uucccccugcacaaggugaggggugggcuggc

SEQ ID NO: 535809 - RNA, 32 nt, Human
uucccccugcagcuacucuucagaucuggcuc

SEQ ID NO: 535810 - RNA, 32 nt, Human
uucccccugcagugcccugcccuugcugcccu

SEQ ID NO: 535811 - RNA, 32 nt, Human
uucccccugcauauugggguugaaaacuuaaa

SEQ ID NO: 535812 - RNA, 32 nt, Human
uucccccugccccaccucucccaccaagaggc

SEQ ID NO: 535813 - RNA, 32 nt, Human
uucccccugccucucuggccucuugucucccc

SEQ ID NO: 535814 - RNA, 32 nt, Human
uucccccugccugugucuucagcccugaugca

SEQ ID NO: 535815 - RNA, 32 nt, Human
uucccccugcuucugccagcagcuccaucuug

SEQ ID NO: 535816 - RNA, 32 nt, Human
uucccccugggugugcagccuauggcuucgug

SEQ ID NO: 535817 - RNA, 32 nt, Human
uucccccuguguaaguuacuaugguuuguggu

SEQ ID NO: 535818 - RNA, 32 nt, Human
uucccccuguguuuucacgcaggucauauugu

SEQ ID NO: 535819 - RNA, 32 nt, Human
uucccccuucacauaaaggaacaugguuuguc

SEQ ID NO: 535820 - RNA, 32 nt, Human
uucccccuuccccugcgcccucccucccucca

SEQ ID NO: 535821 - RNA, 32 nt, Human
uucccccuuccucugggcaggggacagagaga

SEQ ID NO: 535822 - RNA, 32 nt, Human
uuccccgacggggagcacaggagcagcacugc

SEQ ID NO: 535823 - RNA, 32 nt, Human
uuccccgagcacuccagccuggcagucagcac

SEQ ID NO: 535824 - RNA, 32 nt, Human
uuccccgaucagagcuccucugcaggaaacag

SEQ ID NO: 535825 - RNA, 32 nt, Human
uuccccgcaccucgcccugccacugccuccca

SEQ ID NO: 535826 - RNA, 32 nt, Human
uuccccgcaggcucuggcuggccgcaggcugg

SEQ ID NO: 535827 - RNA, 32 nt, Human
uuccccgccaagucccgcaggucucgcagucg

SEQ ID NO: 535828 - RNA, 32 nt, Human
uuccccgcccuguguccauguguucucauugu

SEQ ID NO: 535829 - RNA, 32 nt, Human
uuccccgccugcugcagcuccucccagaaccg

SEQ ID NO: 535830 - RNA, 32 nt, Human
uuccccgcgaggucugggacaagugaagagag

SEQ ID NO: 535831 - RNA, 32 nt, Human
uuccccgcggcaggaagagucucucucugccc

SEQ ID NO: 535832 - RNA, 32 nt, Human
uuccccgcuccugacuccugaccuccaggaug

SEQ ID NO: 535833 - RNA, 32 nt, Human
uuccccggagguugaagcuacagugagccuug

SEQ ID NO: 535834 - RNA, 32 nt, Human
uuccccggccgggagaccaguguuagaggauc

SEQ ID NO: 535835 - RNA, 32 nt, Human
uuccccggcuccacccuaggccacuuuuucua

SEQ ID NO: 535836 - RNA, 32 nt, Human
uuccccgggcugggccacccaucugccuggug

SEQ ID NO: 535837 - RNA, 32 nt, Human
uuccccgggguagaaguccagggugagaaauu

SEQ ID NO: 535838 - RNA, 32 nt, Human
uuccccggucccuugagaccucagccaugagg

SEQ ID NO: 535839 - RNA, 32 nt, Human
uuccccggugagccucaguuccugggcuggac

SEQ ID NO: 535840 - RNA, 32 nt, Human
uuccccgguggagggagggagcagggagcccu

SEQ ID NO: 535841 - RNA, 32 nt, Human
uuccccggugggcucccugguguucggggcug

SEQ ID NO: 535842 - RNA, 32 nt, Human
uuccccggugugagcccggugagggcggcagg

SEQ ID NO: 535843 - RNA, 32 nt, Human
uuccccguggacaugaaggggagggagggugu

SEQ ID NO: 535844 - RNA, 32 nt, Human
uuccccgugguacugagcucacguggacuccc

SEQ ID NO: 535845 - RNA, 32 nt, Human
uuccccgugugggucuagaacuccccuuuggu

SEQ ID NO: 535846 - RNA, 32 nt, Human
uuccccguuccugucacauuuccccagcccca

SEQ ID NO: 535847 - RNA, 31 nt, Human
uuccccguuuugacgacgcacuuguagccac

SEQ ID NO: 535848 - RNA, 22 nt, Human
uuccccuaaugccuucuccugc

SEQ ID NO: 535849 - RNA, 32 nt, Human
uuccccuacaacuaaaaggaaaaggaaacacu

SEQ ID NO: 535850 - RNA, 32 nt, Human
uuccccuacccccaacuuuccccaccagcucc

SEQ ID NO: 535851 - RNA, 32 nt, Human
uuccccuacccuaagcuguagccugggugacu

SEQ ID NO: 535852 - RNA, 24 nt, Human
uuccccuaccucucuuccuucuuc

SEQ ID NO: 535853 - RNA, 32 nt, Human
uuccccucacuccuccccuccuucgcucgcuc

SEQ ID NO: 535854 - RNA, 32 nt, Human
uuccccucacugcacuuuggaccccuggggcc

SEQ ID NO: 535855 - RNA, 32 nt, Human
uuccccucacuuggaggaaccagcacucucca

SEQ ID NO: 535856 - RNA, 24 nt, Human
uuccccucagcuuucccuccucgc

SEQ ID NO: 535857 - RNA, 32 nt, Human
uuccccucauuccuccccuccuucgcucgcuc

SEQ ID NO: 535858 - RNA, 32 nt, Human
uuccccuccagccuggugcugggcuccucggc

SEQ ID NO: 535859 - RNA, 32 nt, Human
uuccccucccggggcccugccggcggcggggc

SEQ ID NO: 535860 - RNA, 32 nt, Human
uuccccucccuauguccauguguucucauugc

SEQ ID NO: 535861 - RNA, 32 nt, Human
uuccccucccuguguccauguguucucauugu

SEQ ID NO: 535862 - RNA, 32 nt, Human
uuccccuccgagggcagagaggcguccgcgcc

SEQ ID NO: 535863 - RNA, 26 nt, Human
uuccccuccgucuuuccccuccccug

SEQ ID NO: 535864 - RNA, 32 nt, Human
uuccccuccucacgccagccuaggagaagaag

SEQ ID NO: 535865 - RNA, 32 nt, Human
uuccccuccuuccaaaaacagccuccaauacc

SEQ ID NO: 535866 - RNA, 32 nt, Human
uuccccuccuuuccuccuccugccccauaaua

SEQ ID NO: 535867 - RNA, 32 nt, Human
uuccccucgcgaucccccuccugccucuucgg

SEQ ID NO: 535868 - RNA, 32 nt, Human
uuccccucuaucugccugaaauaauuuccuaa

SEQ ID NO: 535869 - RNA, 32 nt, Human
uuccccucugagcucugggagggaagggaaug

SEQ ID NO: 535870 - RNA, 32 nt, Human
uuccccucugccauccccuuggggccgguccc

SEQ ID NO: 535871 - RNA, 32 nt, Human
uuccccucugcuacuagccacugagaagugca

SEQ ID NO: 535872 - RNA, 32 nt, Human
uuccccucuggcccagccaccacugccucuca

SEQ ID NO: 535873 - RNA, 32 nt, Human
uuccccucuuuacucccagcaguggcugaaac

SEQ ID NO: 535874 - RNA, 32 nt, Human
uuccccugagcagggucugcugccucagaccc

SEQ ID NO: 535875 - RNA, 32 nt, Human
uuccccugagccugaggggcugcagcugggga

SEQ ID NO: 535876 - RNA, 32 nt, Human
uuccccugcacccacccagcugucuggcccga

SEQ ID NO: 535877 - RNA, 32 nt, Human
uuccccugcaccuggccugggccacaccugag

SEQ ID NO: 535878 - RNA, 24 nt, Human
uuccccugcccuugaucccuucug

SEQ ID NO: 535879 - RNA, 23 nt, Human
uuccccugccugcuccuccaugc

SEQ ID NO: 535880 - RNA, 24 nt, Human
uuccccugcuaucucccuuccugc

SEQ ID NO: 535881 - RNA, 32 nt, Human
uuccccugcuggcugcaagcuguggguucuuu

SEQ ID NO: 535882 - RNA, 19 nt, Human
uuccccugcuguccccuuc

SEQ ID NO: 535883 - RNA, 32 nt, Human
uuccccuggagagucugggauugcacagaaca

SEQ ID NO: 535884 - RNA, 32 nt, Human
uuccccuggccgccuccucugugucauugucu

SEQ ID NO: 535885 - RNA, 29 nt, Human
uuccccuggcugcuguuguaaucuacuug

SEQ ID NO: 535886 - RNA, 29 nt, Human
uuccccuggcugcuucugccuccuaauag

SEQ ID NO: 535887 - RNA, 32 nt, Human
uuccccugggagaggccaggagggccugaucc

SEQ ID NO: 535888 - RNA, 32 nt, Human
uuccccugggcggggcccugcaccgacuccag

SEQ ID NO: 535889 - RNA, 32 nt, Human
uuccccuggggaagcuuugguugaauauuuuc

SEQ ID NO: 535890 - RNA, 21 nt, Human
uuccccuggugugaggccagg

SEQ ID NO: 535891 - RNA, 20 nt, Human
uuccccuguccccacccugc

SEQ ID NO: 535892 - RNA, 22 nt, Human
uuccccuguccccucccccuuc

SEQ ID NO: 535893 - RNA, 23 nt, Human
uuccccuguccugaagccccugu

SEQ ID NO: 535894 - RNA, 32 nt, Human
uuccccuguccugauggucagcucccuucucu

SEQ ID NO: 535895 - RNA, 24 nt, Human
uuccccugucuuucccucuucugc

SEQ ID NO: 535896 - RNA, 32 nt, Human
uuccccugugcugggggccuugagugcuaugc

SEQ ID NO: 535897 - RNA, 32 nt, Human
uuccccuguggcagcuguauguguaguucaau

SEQ ID NO: 535898 - RNA, 20 nt, Human
uuccccuguuaggaaggaug

SEQ ID NO: 535899 - RNA, 21 nt, Human
uuccccuguucucccucuucu

SEQ ID NO: 535900 - RNA, 32 nt, Human
uuccccuuaccuccucucucuggcucgggagc

SEQ ID NO: 535901 - RNA, 32 nt, Human
uuccccuuacucucacaccugggcaaacuuuc

SEQ ID NO: 535902 - RNA, 32 nt, Human
uuccccuucacacccccguggcuggaaggaac

SEQ ID NO: 535903 - RNA, 32 nt, Human
uuccccuuccacccucuccucuuccacccucc

SEQ ID NO: 535904 - RNA, 32 nt, Human
uuccccuucccuucccuucccuuccaucucuu

SEQ ID NO: 535905 - RNA, 32 nt, Human
uuccccuuccuguguccaugugaucucauugu

SEQ ID NO: 535906 - RNA, 32 nt, Human
uuccccuuccuguguccauguguucucauugu

SEQ ID NO: 535907 - RNA, 32 nt, Human
uuccccuuccuuccuuccuuccuuccuuccuu

SEQ ID NO: 535908 - RNA, 32 nt, Human
uuccccuucuccccuguccucaccauaugccu

SEQ ID NO: 535909 - RNA, 32 nt, Human
uuccccuucucccgucagaccuuccugaccuc

SEQ ID NO: 535910 - RNA, 32 nt, Human
uuccccuucucccuccugcuccaggcccaagg

SEQ ID NO: 535911 - RNA, 32 nt, Human
uuccccuucucuucccaggccugggaggggga

SEQ ID NO: 535912 - RNA, 32 nt, Human
uuccccuugcauucuauaagauuacagcaaga

SEQ ID NO: 535913 - RNA, 32 nt, Human
uuccccuugccucacucucucagcuuucuucc

SEQ ID NO: 535914 - RNA, 32 nt, Human
uuccccuugcuguuaccugcugccuucuugug

SEQ ID NO: 535915 - RNA, 32 nt, Human
uuccccuuggcugugucucuuuauuuaugcug

SEQ ID NO: 535916 - RNA, 32 nt, Human
uuccccuugugcaaagagcucuuuuggaccua

SEQ ID NO: 535917 - RNA, 32 nt, Human
uuccccuuuauuucccuuuuccauuuaccccg

SEQ ID NO: 535918 - RNA, 32 nt, Human
uuccccuuugccccugcuucaucccagcucug

SEQ ID NO: 535919 - RNA, 32 nt, Human
uuccccuuugccuucugccaugauucuaaguu

SEQ ID NO: 535920 - RNA, 32 nt, Human
uuccccuuugcuagagcugucucccucucaau

SEQ ID NO: 535921 - RNA, 32 nt, Human
uuccccuuuucccaguccccugcuuuuugaag

SEQ ID NO: 535922 - RNA, 32 nt, Human
uuccccuuuuucucagcacuuccuuuugcugc

SEQ ID NO: 535923 - RNA, 32 nt, Human
uuccccuuuuucugcugccuggcuauuccaug

SEQ ID NO: 535924 - RNA, 32 nt, Human
uucccgaagugcugggauuauaggcguaagcc

SEQ ID NO: 535925 - RNA, 32 nt, Human
uucccgacgagagagacugaggggaagagagg

SEQ ID NO: 535926 - RNA, 32 nt, Human
uucccgacucccugcggcuguguccuuagugc

SEQ ID NO: 535927 - RNA, 22 nt, Human
uucccgacuccugccggaccug

SEQ ID NO: 535928 - RNA, 32 nt, Human
uucccgagacaggcccaugaaaucaugcaggc

SEQ ID NO: 535929 - RNA, 20 nt, Human
uucccgagcacuucggggcc

SEQ ID NO: 535930 - RNA, 32 nt, Human
uucccgagccaucuuuuucuggaacagcgaag

SEQ ID NO: 535931 - RNA, 32 nt, Human
uucccgagcgcuccggccuggcccggcgcccc

SEQ ID NO: 535932 - RNA, 32 nt, Human
uucccgaguagcugggacuacaggcaugugcc

SEQ ID NO: 535933 - RNA, 32 nt, Human
uucccgaguagcugggauuacagaugugcacc

SEQ ID NO: 535934 - RNA, 32 nt, Human
uucccgaguagcugggauuacaggcacacacu

SEQ ID NO: 535935 - RNA, 32 nt, Human
uucccgaguagcugggauuacaggcgccugcc

SEQ ID NO: 535936 - RNA, 32 nt, Human
uucccgaguagcugggauuacaggcgugcgcc

SEQ ID NO: 535937 - RNA, 32 nt, Human
uucccgaguagcugggauuacagguaugaacc

SEQ ID NO: 535938 - RNA, 32 nt, Human
uucccgaguagcugggauuauaggcacacacc

SEQ ID NO: 535939 - RNA, 32 nt, Human
uucccgaguagcugggauuauaggcacccacc

SEQ ID NO: 535940 - RNA, 32 nt, Human
uucccgauaucucacuguccagucccuucauu

SEQ ID NO: 535941 - RNA, 32 nt, Human
uucccgaucuggcugcaucagcauccugguug

SEQ ID NO: 535942 - RNA, 32 nt, Human
uucccgaugucucuucccucugaggccaguag

SEQ ID NO: 535943 - RNA, 32 nt, Human
uucccgcaacacaaguggagagagagguggcc

SEQ ID NO: 535944 - RNA, 32 nt, Human
uucccgcaaucucccuuccaaaucagucacug

SEQ ID NO: 535945 - RNA, 32 nt, Human
uucccgcacucuauucccccagccucuuucug

SEQ ID NO: 535946 - RNA, 32 nt, Human
uucccgcagccuggcuccuguguucccucuau

SEQ ID NO: 535947 - RNA, 32 nt, Human
uucccgcagggugcuggaggaggaaaccggcg

SEQ ID NO: 535948 - RNA, 32 nt, Human
uucccgccuagacucggcgcagggccccgcac

SEQ ID NO: 535949 - RNA, 32 nt, Human
uucccgccuccaggaagggcccuggcucccuu

SEQ ID NO: 535950 - RNA, 32 nt, Human
uucccgccuccccucccgcuugcuuuugccuu

SEQ ID NO: 535951 - RNA, 32 nt, Human
uucccgcggccugcuccgccagccggggucgg

SEQ ID NO: 535952 - RNA, 32 nt, Human
uucccgcguaggcucccaggggccccagggag

SEQ ID NO: 535953 - RNA, 32 nt, Human
uucccgcucgcccggcgccauggauccgcugu

SEQ ID NO: 535954 - RNA, 32 nt, Human
uucccgcugcagcuaucgcgcagucccuccug

SEQ ID NO: 535955 - RNA, 32 nt, Human
uucccgcugccuggcugccuccguggcgguug

SEQ ID NO: 535956 - RNA, 32 nt, Human
uucccgcugguguggagggaaaugcccugguc

SEQ ID NO: 535957 - RNA, 32 nt, Human
uucccgcuugcaggaauggaauccaaacaccu

SEQ ID NO: 535958 - RNA, 32 nt, Human
uucccggaaaguacuaaauuuaagaauguuug

SEQ ID NO: 535959 - RNA, 32 nt, Human
uucccggacugcacuaggcugggagcucuguu

SEQ ID NO: 535960 - RNA, 32 nt, Human
uucccggagccccuugccaauccugacagguc

SEQ ID NO: 535961 - RNA, 32 nt, Human
uucccggagucucccagcugaaauggaagugc

SEQ ID NO: 535962 - RNA, 32 nt, Human
uucccggcaguuuuugccuuaaagcugcccuc

SEQ ID NO: 535963 - RNA, 32 nt, Human
uucccggcucaaguccuuccucucucuuuccu

SEQ ID NO: 535964 - RNA, 21 nt, Human
uucccggcuccgugggaaccu

SEQ ID NO: 535965 - RNA, 32 nt, Human
uucccgggaaguuguuuggugaaggaagcccc

SEQ ID NO: 535966 - RNA, 32 nt, Human
uucccgggaucacuuaaugaaccacguguuuu

SEQ ID NO: 535967 - RNA, 32 nt, Human
uucccggggaaagggaaaagggaccauaggcc

SEQ ID NO: 535968 - RNA, 32 nt, Human
uucccggguggccaguggcucagcagucucgg

SEQ ID NO: 535969 - RNA, 32 nt, Human
uucccggguuuguccugagccugcacuguccu

SEQ ID NO: 535970 - RNA, 32 nt, Human
uucccggucccccagcccauccgccaucccca

SEQ ID NO: 535971 - RNA, 32 nt, Human
uucccggucuguucuguuccacucugaccauc

SEQ ID NO: 535972 - RNA, 32 nt, Human
uucccggugaagccucaccuucaagccaagaa

SEQ ID NO: 535973 - RNA, 32 nt, Human
uucccguaauuacuuauugcaguauuguguuc

SEQ ID NO: 535974 - RNA, 32 nt, Human
uucccguccccuucacugauuucuguuguuuc

SEQ ID NO: 535975 - RNA, 31 nt, Human
uucccguccguacuggaggcuagcucuuguc

SEQ ID NO: 535976 - RNA, 32 nt, Human
uucccgucuccccgucccuccgucuccauccc

SEQ ID NO: 535977 - RNA, 32 nt, Human
uucccgucuccucccuugcuccccuuccucac

SEQ ID NO: 535978 - RNA, 32 nt, Human
uucccguggaguguggggaagcugcugucucc

SEQ ID NO: 535979 - RNA, 32 nt, Human
uucccguggucuccuugcacuuucucaguuca

SEQ ID NO: 535980 - RNA, 32 nt, Human
uucccgugucugucugucuugcaucccuagcc

SEQ ID NO: 535981 - RNA, 32 nt, Human
uucccgugucuguggucaccauuuaggugauc

SEQ ID NO: 535982 - RNA, 32 nt, Human
uucccuaaaauacauuuaaaacuuaccuaagu

SEQ ID NO: 535983 - RNA, 32 nt, Human
uucccuaagaaagagcugaaaugacugagaac

SEQ ID NO: 535984 - RNA, 32 nt, Human
uucccuaagaagggaaaaagagagggaagaac

SEQ ID NO: 535985 - RNA, 32 nt, Human
uucccuaagccaagcuccccaggcccagcuca

SEQ ID NO: 535986 - RNA, 32 nt, Human
uucccuaaggggcagguccagagcagggccca

SEQ ID NO: 535987 - RNA, 32 nt, Human
uucccuaaggggccccagccaaggagcugagc

SEQ ID NO: 535988 - RNA, 32 nt, Human
uucccuaccugacacagccauggcccagcccc

SEQ ID NO: 535989 - RNA, 32 nt, Human
uucccuacgcuuuucccugccuaggccucgug

SEQ ID NO: 535990 - RNA, 32 nt, Human
uucccuacucaggcuuucguagugauuagcuu

SEQ ID NO: 535991 - RNA, 32 nt, Human
uucccuacuuccuaaacucucuuccagcaucg

SEQ ID NO: 535992 - RNA, 32 nt, Human
uucccuagaaauccucuccagcauucuugcca

SEQ ID NO: 535993 - RNA, 32 nt, Human
uucccuagacaccuccggggucccuaccugga

SEQ ID NO: 535994 - RNA, 32 nt, Human
uucccuagagucauuuuugaaaccacugauug

SEQ ID NO: 535995 - RNA, 19 nt, Human
uucccuagcucucugcacu

SEQ ID NO: 535996 - RNA, 23 nt, Human
uucccuagcugugcagcugcaag

SEQ ID NO: 535997 - RNA, 32 nt, Human
uucccuagcugugccauuuggugcucugccag

SEQ ID NO: 535998 - RNA, 32 nt, Human
uucccuaggccugcuggcucugguuuucuaug

SEQ ID NO: 535999 - RNA, 32 nt, Human
uucccuagucacagagcagcugugaugggacc

SEQ ID NO: 536000 - RNA, 32 nt, Human
uucccuaguuuauaagacaggagaaaagggag

SEQ ID NO: 536001 - RNA, 32 nt, Human
uucccuaucuuggaccugaggcugcuuucuug

SEQ ID NO: 536002 - RNA, 32 nt, Human
uucccuaugcagagacaggagagaggucuugu

SEQ ID NO: 536003 - RNA, 31 nt, Human
uucccuauggcagaaggcaaccacagaaaaa

SEQ ID NO: 536004 - RNA, 32 nt, Human
uucccuauuacugcuaguaugcuacuucuuac

SEQ ID NO: 536005 - RNA, 32 nt, Human
uucccuauucagcagcauuuuaaucacauguc

SEQ ID NO: 536006 - RNA, 32 nt, Human
uucccuauucaggugaggggaucaauagaaac

SEQ ID NO: 536007 - RNA, 22 nt, Human
uucccuauuuacaccucagggu

SEQ ID NO: 536008 - RNA, 32 nt, Human
uucccucaaaaacaaagaacuaaaggcaagca

SEQ ID NO: 536009 - RNA, 32 nt, Human
uucccucacucaggaacucuguuucugaaguc

SEQ ID NO: 536010 - RNA, 32 nt, Human
uucccucagcaaccuguguguucaaagguuag

SEQ ID NO: 536011 - RNA, 32 nt, Human
uucccucagcuuuguacaucagcacuguuuug

SEQ ID NO: 536012 - RNA, 32 nt, Human
uucccucagugauuucaggaacugacaauucc

SEQ ID NO: 536013 - RNA, 32 nt, Human
uucccucauccagcagcuggcaucugaccuug

SEQ ID NO: 536014 - RNA, 32 nt, Human
uucccucaugccaacugcagugaucuaggcac

SEQ ID NO: 536015 - RNA, 32 nt, Human
uucccucauucccgcugaccucacuggcccac

SEQ ID NO: 536016 - RNA, 32 nt, Human
uucccucauucguguugcuggaacuggagcac

SEQ ID NO: 536017 - RNA, 32 nt, Human
uucccuccaaacugcugacuaggucauccucu

SEQ ID NO: 536018 - RNA, 32 nt, Human
uucccuccacaagagauauaccaccuuuaaaa

SEQ ID NO: 536019 - RNA, 32 nt, Human
uucccuccacagacaauguccucuguucaauu

SEQ ID NO: 536020 - RNA, 32 nt, Human
uucccuccacccaggccagcagccgucagagc

SEQ ID NO: 536021 - RNA, 32 nt, Human
uucccuccacggcccaggucuccucacucaaa

SEQ ID NO: 536022 - RNA, 32 nt, Human
uucccuccagccgccgccguccagccgagucc

SEQ ID NO: 536023 - RNA, 32 nt, Human
uucccuccagccugggcaauagagcaagaugc

SEQ ID NO: 536024 - RNA, 20 nt, Human
uucccuccaggggcauccag

SEQ ID NO: 536025 - RNA, 32 nt, Human
uucccuccagucagggccaggcguggacgccg

SEQ ID NO: 536026 - RNA, 32 nt, Human
uucccuccaucuaacauucaaauuuaacuauc

SEQ ID NO: 536027 - RNA, 32 nt, Human
uucccuccaugcaccaucacuguggcuggcag

SEQ ID NO: 536028 - RNA, 32 nt, Human
uucccuccauucugugggacagucugucauuu

SEQ ID NO: 536029 - RNA, 32 nt, Human
uucccuccauuuuucucccaagaaaccugacu

SEQ ID NO: 536030 - RNA, 21 nt, Human
uucccucccagugaauggaau

SEQ ID NO: 536031 - RNA, 32 nt, Human
uucccuccccaaguuugcuauucaaaucaacu

SEQ ID NO: 536032 - RNA, 21 nt, Human
uucccuccccacccaccaccu

SEQ ID NO: 536033 - RNA, 19 nt, Human
uucccucccccugccgagg

SEQ ID NO: 536034 - RNA, 32 nt, Human
uucccuccccuccccuuccuguccuuucacaa

SEQ ID NO: 536035 - RNA, 32 nt, Human
uucccucccuccaguauugcccccucucacuu

SEQ ID NO: 536036 - RNA, 32 nt, Human
uucccucccucccucucuccccagcugccucc

SEQ ID NO: 536037 - RNA, 32 nt, Human
uucccucccugccucccccagcucccacacug

SEQ ID NO: 536038 - RNA, 32 nt, Human
uucccucccuuccuccuucucuccuucucucc

SEQ ID NO: 536039 - RNA, 32 nt, Human
uucccucccuuuccuuuuccuauguacuuccu

SEQ ID NO: 536040 - RNA, 32 nt, Human
uucccucccuuucuuuuucuuacuagugcacu

SEQ ID NO: 536041 - RNA, 32 nt, Human
uucccuccgggauccccugccuggugcccaca

SEQ ID NO: 536042 - RNA, 32 nt, Human
uucccuccgggguccagggaggagaacagaaa

SEQ ID NO: 536043 - RNA, 32 nt, Human
uucccuccuaccacugcuuugacuguaccugu

SEQ ID NO: 536044 - RNA, 32 nt, Human
uucccuccucacaucccucccacccucgguca

SEQ ID NO: 536045 - RNA, 32 nt, Human
uucccuccuccccugucucuggcugucucgag

SEQ ID NO: 536046 - RNA, 32 nt, Human
uucccuccuccccuuucuccccuccguccccg

SEQ ID NO: 536047 - RNA, 32 nt, Human
uucccuccugcuccccagagacugccuccgcc

SEQ ID NO: 536048 - RNA, 21 nt, Human
uucccuccuuccaguguuccu

SEQ ID NO: 536049 - RNA, 32 nt, Human
uucccuccuugcacagaugcauacacuggggc

SEQ ID NO: 536050 - RNA, 32 nt, Human
uucccucgccuuccuguuccuggcggagccgg

SEQ ID NO: 536051 - RNA, 32 nt, Human
uucccucuaacccacaccaccuuucuacucac

SEQ ID NO: 536052 - RNA, 32 nt, Human
uucccucuaccucccccaguuagugacaggau

SEQ ID NO: 536053 - RNA, 32 nt, Human
uucccucucauuuugaccuacucucaugcugc

SEQ ID NO: 536054 - RNA, 32 nt, Human
uucccucuccacccguucugccucagugguuu

SEQ ID NO: 536055 - RNA, 32 nt, Human
uucccucucccagauugguggggagggagggc

SEQ ID NO: 536056 - RNA, 32 nt, Human
uucccucucccucccucucuucccauucuccu

SEQ ID NO: 536057 - RNA, 32 nt, Human
uucccucucccuucuuccccaccaacaaaacc

SEQ ID NO: 536058 - RNA, 32 nt, Human
uucccucuccuuccacaccacacuuacuguag

SEQ ID NO: 536059 - RNA, 18 nt, Human
uucccucucuccagggca

SEQ ID NO: 536060 - RNA, 32 nt, Human
uucccucucugacccaggcugaguccauacug

SEQ ID NO: 536061 - RNA, 32 nt, Human
uucccucucuggcguccccggcugcuuguacu

SEQ ID NO: 536062 - RNA, 32 nt, Human
uucccucucuuaucccugaggguggguaagaa

SEQ ID NO: 536063 - RNA, 32 nt, Human
uucccucugagcuacuuccugggcauaguuac

SEQ ID NO: 536064 - RNA, 32 nt, Human
uucccucugcccaggugggggccguggcugga

SEQ ID NO: 536065 - RNA, 32 nt, Human
uucccucugccucugucuccccacaucguccc

SEQ ID NO: 536066 - RNA, 21 nt, Human
uucccucugcuguggguucug

SEQ ID NO: 536067 - RNA, 32 nt, Human
uucccucugggagccuaaaccaggcugcaucg

SEQ ID NO: 536068 - RNA, 32 nt, Human
uucccucugggagucucauggguccagcauca

SEQ ID NO: 536069 - RNA, 32 nt, Human
uucccucugggcagaggcccaucugcucuguu

SEQ ID NO: 536070 - RNA, 32 nt, Human
uucccucugucgcccaggcuagagugcaaugg

SEQ ID NO: 536071 - RNA, 32 nt, Human
uucccucuuccucucauugagggugaugacaa

SEQ ID NO: 536072 - RNA, 32 nt, Human
uucccucuuccucuuuaccuuuccugguccug

SEQ ID NO: 536073 - RNA, 32 nt, Human
uucccucuuccuucccugcugugaaagaagua

SEQ ID NO: 536074 - RNA, 32 nt, Human
uucccucuugucucccugaaaucuacccacuc

SEQ ID NO: 536075 - RNA, 32 nt, Human
uucccucuuucuccucccucuccuccucucac

SEQ ID NO: 536076 - RNA, 32 nt, Human
uucccucuuuucccaucucauucuucccucuu

SEQ ID NO: 536077 - RNA, 32 nt, Human
uucccugacaucagagguaagagcaucuggaa

SEQ ID NO: 536078 - RNA, 32 nt, Human
uucccugacauucuucuaccuaacccacugcu

SEQ ID NO: 536079 - RNA, 32 nt, Human
uucccugaccauugucugcugugugcucccga

SEQ ID NO: 536080 - RNA, 21 nt, Human
uucccugaccuggagaggguu

SEQ ID NO: 536081 - RNA, 32 nt, Human
uucccugacuccaggccugaaccccucccgug

SEQ ID NO: 536082 - RNA, 23 nt, Human
uucccugacuuaaaccucacuga

SEQ ID NO: 536083 - RNA, 32 nt, Human
uucccugagaaaggagaaaaagaugggauugc

SEQ ID NO: 536084 - RNA, 32 nt, Human
uucccugagagaaguagcacucagguuagcaa

SEQ ID NO: 536085 - RNA, 32 nt, Human
uucccugagcucacccagccccagcuccagga

SEQ ID NO: 536086 - RNA, 32 nt, Human
uucccugaggagcugggacaugcugggcaguu

SEQ ID NO: 536087 - RNA, 32 nt, Human
uucccugaggccucuggacccaucugucuucc

SEQ ID NO: 536088 - RNA, 32 nt, Human
uucccugagucucaagagcucuugccuuaccc

SEQ ID NO: 536089 - RNA, 32 nt, Human
uucccugcaacaucuccaccucccaauagucu

SEQ ID NO: 536090 - RNA, 32 nt, Human
uucccugcaaggugcaccugccccaggcucag

SEQ ID NO: 536091 - RNA, 32 nt, Human
uucccugcaccacucucuucauccugggggcu

SEQ ID NO: 536092 - RNA, 32 nt, Human
uucccugcagaucuccagcccagaaccaucuu

SEQ ID NO: 536093 - RNA, 19 nt, Human
uucccugcagccccuggcc

SEQ ID NO: 536094 - RNA, 32 nt, Human
uucccugcagcugcaaccugcccucugguccc

SEQ ID NO: 536095 - RNA, 32 nt, Human
uucccugccaccuccagccucugccagcaaug

SEQ ID NO: 536096 - RNA, 32 nt, Human
uucccugccaucucaaagaggagcaauguauc

SEQ ID NO: 536097 - RNA, 32 nt, Human
uucccugcccaaacccuuaacugacaugggcc

SEQ ID NO: 536098 - RNA, 32 nt, Human
uucccugcccacccuguccccuacaauuugug

SEQ ID NO: 536099 - RNA, 32 nt, Human
uucccugcccagcuuucgggaucucuggcccc

SEQ ID NO: 536100 - RNA, 32 nt, Human
uucccugccccuggucuggucucccccaaaag

SEQ ID NO: 536101 - RNA, 32 nt, Human
uucccugcccuuucccccuccucagguucuuc

SEQ ID NO: 536102 - RNA, 32 nt, Human
uucccugcccuuucugagcucuuccuuccuua

SEQ ID NO: 536103 - RNA, 32 nt, Human
uucccugccuaggagcuggggagggagagauc

SEQ ID NO: 536104 - RNA, 32 nt, Human
uucccugccucccccaggccucaggcccagca

SEQ ID NO: 536105 - RNA, 32 nt, Human
uucccugccucccuuuuucaucaauugcaaug

SEQ ID NO: 536106 - RNA, 32 nt, Human
uucccugccugagacacguauggaagccaaga

SEQ ID NO: 536107 - RNA, 32 nt, Human
uucccugccugccucccucccccugcuagaag

SEQ ID NO: 536108 - RNA, 32 nt, Human
uucccugccuggggcgggccccucaucgcguc

SEQ ID NO: 536109 - RNA, 32 nt, Human
uucccugcgcucacaaaaaccuggugaggguc

SEQ ID NO: 536110 - RNA, 17 nt, Human
uucccugcggcccagag

SEQ ID NO: 536111 - RNA, 32 nt, Human
uucccugcguggaggaagcccacccagcaagc

SEQ ID NO: 536112 - RNA, 32 nt, Human
uucccugcuagccucagccuccauugugguau

SEQ ID NO: 536113 - RNA, 32 nt, Human
uucccugcugacuuggccacggaaacugguuc

SEQ ID NO: 536114 - RNA, 32 nt, Human
uucccugcugcugaguggagagaggccucauc

SEQ ID NO: 536115 - RNA, 32 nt, Human
uucccuggaacaaggaggugggggcagugugg

SEQ ID NO: 536116 - RNA, 32 nt, Human
uucccuggaaguggcagcagcagugagcaguc

SEQ ID NO: 536117 - RNA, 32 nt, Human
uucccuggaaugggacaggcagcucuagucag

SEQ ID NO: 536118 - RNA, 32 nt, Human
uucccuggacaggcagccuccuuuguguguau

SEQ ID NO: 536119 - RNA, 32 nt, Human
uucccuggacuaccuucaggaggcacgagagc

SEQ ID NO: 536120 - RNA, 32 nt, Human
uucccuggaggccacagaggagcaccaaggag

SEQ ID NO: 536121 - RNA, 16 nt, Human
uucccuggaggccagg

SEQ ID NO: 536122 - RNA, 32 nt, Human
uucccuggaucacuccacaguccucaggcuuc

SEQ ID NO: 536123 - RNA, 31 nt, Human
uucccuggcaguaccaccaugccaggcguca

SEQ ID NO: 536124 - RNA, 32 nt, Human
uucccuggccagaugccugaucagaugagaag

SEQ ID NO: 536125 - RNA, 32 nt, Human
uucccuggcccugcaggcuccugcugcaccgc

SEQ ID NO: 536126 - RNA, 32 nt, Human
uucccuggccuuucauauuuuagcuacuauau

SEQ ID NO: 536127 - RNA, 32 nt, Human
uucccuggcgcugcucccaaagauuucugacu

SEQ ID NO: 536128 - RNA, 32 nt, Human
uucccuggcuagucugugccuggucaccaggg

SEQ ID NO: 536129 - RNA, 32 nt, Human
uucccuggcuccaagggcccauuuccuccuag

SEQ ID NO: 536130 - RNA, 23 nt, Human
uucccuggcucuaccucuucugc

SEQ ID NO: 536131 - RNA, 20 nt, Human
uucccuggcucugaaggggu

SEQ ID NO: 536132 - RNA, 32 nt, Human
uucccuggcuucuuucuuucccucucucuuuc

SEQ ID NO: 536133 - RNA, 32 nt, Human
uucccugggacgguggcacagauggaagaaaa

SEQ ID NO: 536134 - RNA, 32 nt, Human
uucccugggagaagacguaucaaaagggaugg

SEQ ID NO: 536135 - RNA, 32 nt, Human
uucccugggaggaucuggagguuguucucugc

SEQ ID NO: 536136 - RNA, 32 nt, Human
uucccugggcuggucuucccuuguacaucgau

SEQ ID NO: 536137 - RNA, 32 nt, Human
uucccuggggaaugucagguuuugaaaaucuc

SEQ ID NO: 536138 - RNA, 32 nt, Human
uucccuggggagcccuuucuuaccuucuuuac

SEQ ID NO: 536139 - RNA, 32 nt, Human
uucccugggggaagucuguucuuugguaugga

SEQ ID NO: 536140 - RNA, 32 nt, Human
uucccuggguccauuucaaagcgcaaacugug

SEQ ID NO: 536141 - RNA, 32 nt, Human
uucccuggguccauuucaaagugcaaacugug

SEQ ID NO: 536142 - RNA, 32 nt, Human
uucccuggguugccucuuuucugccauguggg

SEQ ID NO: 536143 - RNA, 24 nt, Human
uucccugguacugugaaagaguca

SEQ ID NO: 536144 - RNA, 32 nt, Human
uucccuggucucaguucacaagccucaccugu

SEQ ID NO: 536145 - RNA, 22 nt, Human
uucccuggugccaaaaaggguu

SEQ ID NO: 536146 - RNA, 32 nt, Human
uucccuggugugggugaggaugugguuuagga

SEQ ID NO: 536147 - RNA, 32 nt, Human
uucccugguguuagacgcgcucucccuccuuc

SEQ ID NO: 536148 - RNA, 22 nt, Human
uucccugguuaagaaaugaccu

SEQ ID NO: 536149 - RNA, 32 nt, Human
uucccugguucugugagccucugccuuuuccu

SEQ ID NO: 536150 - RNA, 32 nt, Human
uucccugguuugagacucacuuccucaucucc

SEQ ID NO: 536151 - RNA, 32 nt, Human
uucccugguuuucugucacuggcacaggaggg

SEQ ID NO: 536152 - RNA, 32 nt, Human
uucccuguaugguuguccucuggccauugaga

SEQ ID NO: 536153 - RNA, 32 nt, Human
uucccugucuacugcucaggcucucccacuuc

SEQ ID NO: 536154 - RNA, 32 nt, Human
uucccugucuccauucucuagcacgugaaauc

SEQ ID NO: 536155 - RNA, 32 nt, Human
uucccugucuugugugcuucgcgagguagagc

SEQ ID NO: 536156 - RNA, 32 nt, Human
uucccugugcaacaucagauuugcaggaaaaa

SEQ ID NO: 536157 - RNA, 32 nt, Human
uucccugugcaaucuucccuugcccauggucu

SEQ ID NO: 536158 - RNA, 32 nt, Human
uucccugugccuccucccucccucccgacuca

SEQ ID NO: 536159 - RNA, 19 nt, Human
uucccugugcuaucuucca

SEQ ID NO: 536160 - RNA, 32 nt, Human
uucccugugggauguugggcagucucuguugu

SEQ ID NO: 536161 - RNA, 32 nt, Human
uucccuguggucagcuccuuccccaccuuuua

SEQ ID NO: 536162 - RNA, 32 nt, Human
uucccuguuccuucugggucaggcugucacuu

SEQ ID NO: 536163 - RNA, 32 nt, Human
uucccuguucuucuguuucucacacacuuucu

SEQ ID NO: 536164 - RNA, 32 nt, Human
uucccuuacccauguuaucauuuccuuucuau

SEQ ID NO: 536165 - RNA, 32 nt, Human
uucccuuacugagcuugcugagcuccggggcc

SEQ ID NO: 536166 - RNA, 32 nt, Human
uucccuuacuucuccccuuccccucccccucc

SEQ ID NO: 536167 - RNA, 32 nt, Human
uucccuuagccaucuuucuuaugcuuucuuug

SEQ ID NO: 536168 - RNA, 32 nt, Human
uucccuuaguuucuuuucauaaaguaaguuau

SEQ ID NO: 536169 - RNA, 32 nt, Human
uucccuuaucuguuuucuaccuccuccuuugu

SEQ ID NO: 536170 - RNA, 32 nt, Human
uucccuuaugccagguuccagucuugagagga

SEQ ID NO: 536171 - RNA, 32 nt, Human
uucccuucaaaacccagccucuugcaagaagc

SEQ ID NO: 536172 - RNA, 32 nt, Human
uucccuucaagcaucucccucauccuggacuc

SEQ ID NO: 536173 - RNA, 32 nt, Human
uucccuucaagugugaaggaaggugugaugaa

SEQ ID NO: 536174 - RNA, 32 nt, Human
uucccuucagcccauucccccucgguuuuauc

SEQ ID NO: 536175 - RNA, 20 nt, Human
uucccuucauccugcuuaau

SEQ ID NO: 536176 - RNA, 32 nt, Human
uucccuucauuucccccuccuuugcuggaugg

SEQ ID NO: 536177 - RNA, 32 nt, Human
uucccuuccacaggcugguugcaugugccaug

SEQ ID NO: 536178 - RNA, 32 nt, Human
uucccuuccaucucccccuccucccugccuuc

SEQ ID NO: 536179 - RNA, 32 nt, Human
uucccuucccacccucuugucuucagggaauu

SEQ ID NO: 536180 - RNA, 32 nt, Human
uucccuucccacucgcugcuucccacagggug

SEQ ID NO: 536181 - RNA, 32 nt, Human
uucccuuccccagggcccccaagggugucuca

SEQ ID NO: 536182 - RNA, 32 nt, Human
uucccuuccccugugacuccucccuuccccac

SEQ ID NO: 536183 - RNA, 32 nt, Human
uucccuucccuucccuucccuuuccuuuuccc

SEQ ID NO: 536184 - RNA, 32 nt, Human
uucccuucccuuccuuucccuucccuagccag

SEQ ID NO: 536185 - RNA, 32 nt, Human
uucccuuccguucacucauuccuuccuuuccu

SEQ ID NO: 536186 - RNA, 32 nt, Human
uucccuuccuccgccuuccucucccucuccug

SEQ ID NO: 536187 - RNA, 32 nt, Human
uucccuuccucucucucaccuucaccacccaa

SEQ ID NO: 536188 - RNA, 32 nt, Human
uucccuuccucuuccugcccuugaacccccuc

SEQ ID NO: 536189 - RNA, 32 nt, Human
uucccuuccuucugcccugccugccucccugc

SEQ ID NO: 536190 - RNA, 32 nt, Human
uucccuuccuuuccuuucucaggccuugcucc

SEQ ID NO: 536191 - RNA, 32 nt, Human
uucccuucuacccucuauucucuugugucugu

SEQ ID NO: 536192 - RNA, 32 nt, Human
uucccuucucaucaucuucaucucagcuauua

SEQ ID NO: 536193 - RNA, 32 nt, Human
uucccuucucccaccuucuacugggcauaauu

SEQ ID NO: 536194 - RNA, 20 nt, Human
uucccuucucccucgcuguu

SEQ ID NO: 536195 - RNA, 32 nt, Human
uucccuucucggugcccuccucucuuuccuca

SEQ ID NO: 536196 - RNA, 32 nt, Human
uucccuucuggugugucuguugaucuguguuu

SEQ ID NO: 536197 - RNA, 32 nt, Human
uucccuucuucaaauccucccacccuucaaug

SEQ ID NO: 536198 - RNA, 32 nt, Human
uucccuucuuuaucaucuccccuuuccucucc

SEQ ID NO: 536199 - RNA, 32 nt, Human
uucccuugaacugccuugucuuugucauggaa

SEQ ID NO: 536200 - RNA, 32 nt, Human
uucccuugaggaaacaacagcuuuaaaagaaa

SEQ ID NO: 536201 - RNA, 32 nt, Human
uucccuugcaggagaagagggaagugaaaaga

SEQ ID NO: 536202 - RNA, 32 nt, Human
uucccuugcaucuucgcagacauuuccgaccc

SEQ ID NO: 536203 - RNA, 32 nt, Human
uucccuugccuaucccuaccucccuccuacua

SEQ ID NO: 536204 - RNA, 31 nt, Human
uucccuugccucuccuggauggguugucagc

SEQ ID NO: 536205 - RNA, 32 nt, Human
uucccuugccuucuuggacuucuugaaaucaa

SEQ ID NO: 536206 - RNA, 32 nt, Human
uucccuugcuccucuuucuuccuuuucuuuuc

SEQ ID NO: 536207 - RNA, 32 nt, Human
uucccuuggagaaggaccaauggggaauggca

SEQ ID NO: 536208 - RNA, 32 nt, Human
uucccuuguaucaagacaccuuccucagcuuc

SEQ ID NO: 536209 - RNA, 18 nt, Human
uucccuuguccggaggau

SEQ ID NO: 536210 - RNA, 32 nt, Human
uucccuuguuuuuauauugggagugaaaagau

SEQ ID NO: 536211 - RNA, 24 nt, Human
uucccuuuaguagaaccucacuaa

SEQ ID NO: 536212 - RNA, 32 nt, Human
uucccuuuauuuccuuuaccuuuuguuuuucc

SEQ ID NO: 536213 - RNA, 22 nt, Human
uucccuuuccccucagcuuacu

SEQ ID NO: 536214 - RNA, 23 nt, Human
uucccuuuccccucagcuuacuu

SEQ ID NO: 536215 - RNA, 32 nt, Human
uucccuuuccccucagcuuacuuacucccaga

SEQ ID NO: 536216 - RNA, 32 nt, Human
uucccuuucccuuucuuuucuuucuuuacuuu

SEQ ID NO: 536217 - RNA, 32 nt, Human
uucccuuuccuccaaaccccuaacucccucca

SEQ ID NO: 536218 - RNA, 32 nt, Human
uucccuuucuccccuuccaccugcugcgggcu

SEQ ID NO: 536219 - RNA, 32 nt, Human
uucccuuucuuauucccagaagagcucagaga

SEQ ID NO: 536220 - RNA, 32 nt, Human
uucccuuucuucuuuccuuuuuguuuuugugu

SEQ ID NO: 536221 - RNA, 32 nt, Human
uucccuuucuuuccuuuuucccuguccuuuuc

SEQ ID NO: 536222 - RNA, 32 nt, Human
uucccuuugcccacccugcccucucucccucu

SEQ ID NO: 536223 - RNA, 32 nt, Human
uucccuuugccuccuccagcucauuuuucaca

SEQ ID NO: 536224 - RNA, 32 nt, Human
uucccuuugccuucccuucuucccacaaaaga

SEQ ID NO: 536225 - RNA, 21 nt, Human
uucccuuuggacaguguuaca

SEQ ID NO: 536226 - RNA, 32 nt, Human
uucccuuuggccucccccuuuacccagcucuu

SEQ ID NO: 536227 - RNA, 32 nt, Human
uucccuuugguacagaccucuugucagugcua

SEQ ID NO: 536228 - RNA, 32 nt, Human
uucccuuuuccaagccuuccccaaccuccccc

SEQ ID NO: 536229 - RNA, 32 nt, Human
uuccgaaaguggugggauuacaagcaugagcc

SEQ ID NO: 536230 - RNA, 32 nt, Human
uuccgaacgagucuccuuuccuuggggcucgc

SEQ ID NO: 536231 - RNA, 22 nt, Human
uuccgaaggaagagucuuuuca

SEQ ID NO: 536232 - RNA, 32 nt, Human
uuccgaaggcauuuuccacuaguuuuuggacu

SEQ ID NO: 536233 - RNA, 32 nt, Human
uuccgaagucuaccuagugccccagccgaacc

SEQ ID NO: 536234 - RNA, 22 nt, Human
uuccgaccacucagcugucagg

SEQ ID NO: 536235 - RNA, 32 nt, Human
uuccgacccugcccugugccccggcccaccug

SEQ ID NO: 536236 - RNA, 32 nt, Human
uuccgaccgcugcgcgcggcuccugggcuguc

SEQ ID NO: 536237 - RNA, 32 nt, Human
uuccgaccuccacccggaccccgaccccgacc

SEQ ID NO: 536238 - RNA, 23 nt, Human
uuccgacugccaucuuggacuug

SEQ ID NO: 536239 - RNA, 32 nt, Human
uuccgagagaaaaggggcagcuggaggcagau

SEQ ID NO: 536240 - RNA, 32 nt, Human
uuccgagcaaacaugugagcccaggaauuucc

SEQ ID NO: 536241 - RNA, 32 nt, Human
uuccgaggaagagaaugcugagccaggguuua

SEQ ID NO: 536242 - RNA, 32 nt, Human
uuccgaggaauagaggagaguguaagggagua

SEQ ID NO: 536243 - RNA, 24 nt, Human
uuccgaggagcuuucuggcugccu

SEQ ID NO: 536244 - RNA, 32 nt, Human
uuccgaggccaccguuuaacaggaguccccgc

SEQ ID NO: 536245 - RNA, 32 nt, Human
uuccgaggcugcagggccaggcgcgggaccgc

SEQ ID NO: 536246 - RNA, 32 nt, Human
uuccgaggcuucugcacucgccugggaagagg

SEQ ID NO: 536247 - RNA, 32 nt, Human
uuccgagggaggcaggggacggccagcggcag

SEQ ID NO: 536248 - RNA, 32 nt, Human
uuccgagugagugccaucgucaccuacgugag

SEQ ID NO: 536249 - RNA, 32 nt, Human
uuccgagugccuggcccagucucucccgccuc

SEQ ID NO: 536250 - RNA, 32 nt, Human
uuccgaguugcucuucuuccaggcuccguugg

SEQ ID NO: 536251 - RNA, 32 nt, Human
uuccgaugugccaccugcaguaguggaucaug

SEQ ID NO: 536252 - RNA, 21 nt, Human
uuccgauuaccuagauaccuc

SEQ ID NO: 536253 - RNA, 32 nt, Human
uuccgauuuacaaauguaaaauugcagcuuau

SEQ ID NO: 536254 - RNA, 32 nt, Human
uuccgcaaccuggaguuggaggcauugcaggc

SEQ ID NO: 536255 - RNA, 32 nt, Human
uuccgcaagugcugggauuacaggcgugagcu

SEQ ID NO: 536256 - RNA, 32 nt, Human
uuccgcaccaauaaagccuucaaacucccuaa

SEQ ID NO: 536257 - RNA, 32 nt, Human
uuccgcaccucuccaucuucaucuacgcagcc

SEQ ID NO: 536258 - RNA, 32 nt, Human
uuccgcacgcuuccaccuccuucgaccuccac

SEQ ID NO: 536259 - RNA, 32 nt, Human
uuccgcacuucacuugcagguucugagagagg

SEQ ID NO: 536260 - RNA, 32 nt, Human
uuccgcagacuggccaagagccagguucuaag

SEQ ID NO: 536261 - RNA, 32 nt, Human
uuccgcagagaaaacugaagccucccaucgug

SEQ ID NO: 536262 - RNA, 32 nt, Human
uuccgcagagaccagagaucucuguacuucaa

SEQ ID NO: 536263 - RNA, 32 nt, Human
uuccgcagucugaggcucagggccaggcuguu

SEQ ID NO: 536264 - RNA, 24 nt, Human
uuccgcaguguggccaggcugccu

SEQ ID NO: 536265 - RNA, 32 nt, Human
uuccgcauaacacuuccuaucuugucacugag

SEQ ID NO: 536266 - RNA, 32 nt, Human
uuccgcaugccuccugccuccugggcuauucc

SEQ ID NO: 536267 - RNA, 32 nt, Human
uuccgcaugcuguguuaaggggagacuaggcu

SEQ ID NO: 536268 - RNA, 32 nt, Human
uuccgccaucuugauucuuucucacugaccaa

SEQ ID NO: 536269 - RNA, 32 nt, Human
uuccgcccucuuugagaacucagaccugacca

SEQ ID NO: 536270 - RNA, 32 nt, Human
uuccgcccugggaaagcggcuucccagaccuc

SEQ ID NO: 536271 - RNA, 23 nt, Human
uuccgccgccugccccagugugg

SEQ ID NO: 536272 - RNA, 32 nt, Human
uuccgccggguuucacuguccgugacuuccuu

SEQ ID NO: 536273 - RNA, 32 nt, Human
uuccgccucccacccucuccccaucugcucug

SEQ ID NO: 536274 - RNA, 32 nt, Human
uuccgccucuacugguucccgcucaagguccu

SEQ ID NO: 536275 - RNA, 32 nt, Human
uuccgccuggcuuaccacaguugugugugguu

SEQ ID NO: 536276 - RNA, 32 nt, Human
uuccgccuguaaucccagcacuuugggagguc

SEQ ID NO: 536277 - RNA, 32 nt, Human
uuccgcgacccccaucagccccgccucacucu

SEQ ID NO: 536278 - RNA, 32 nt, Human
uuccgcgagccgggcugaguuggugaacacgg

SEQ ID NO: 536279 - RNA, 32 nt, Human
uuccgcgccaugcagagcccagucucuggcac

SEQ ID NO: 536280 - RNA, 32 nt, Human
uuccgcgcugccggcagggcuugggggcgccu

SEQ ID NO: 536281 - RNA, 32 nt, Human
uuccgcgggaggcgggcgggaggcggacgcgg

SEQ ID NO: 536282 - RNA, 32 nt, Human
uuccgcgggagggagaguuagcuagccaucca

SEQ ID NO: 536283 - RNA, 32 nt, Human
uuccgcucacugcaaccuccgccucccagguu

SEQ ID NO: 536284 - RNA, 32 nt, Human
uuccgcucacugcaaccucugcuucccggguu

SEQ ID NO: 536285 - RNA, 32 nt, Human
uuccgcuccaggaaggcgaggucggaucugag

SEQ ID NO: 536286 - RNA, 32 nt, Human
uuccgcuccuuugccagcaccgagcucuucca

SEQ ID NO: 536287 - RNA, 32 nt, Human
uuccgcugcauccagacuuccucaggcggugg

SEQ ID NO: 536288 - RNA, 32 nt, Human
uuccgcugccucauuccuuuccuuccuagccu

SEQ ID NO: 536289 - RNA, 32 nt, Human
uuccgcuggagcugucugccaaaagaaacugc

SEQ ID NO: 536290 - RNA, 32 nt, Human
uuccgcuuccacagggccgcccccucuccucc

SEQ ID NO: 536291 - RNA, 32 nt, Human
uuccgcuuugcacuccaccccgguagcagcuc

SEQ ID NO: 536292 - RNA, 32 nt, Human
uuccggaaaagugcuggagaggauguggagaa

SEQ ID NO: 536293 - RNA, 32 nt, Human
uuccggaaggggaggaagcgggaggcaggccu

SEQ ID NO: 536294 - RNA, 32 nt, Human
uuccggacacuguggagagggaccaguggugg

SEQ ID NO: 536295 - RNA, 25 nt, Human
uuccggagcagccccacauaccuca

SEQ ID NO: 536296 - RNA, 31 nt, Human
uuccggaggaaaccuguuugacuugaguaga

SEQ ID NO: 536297 - RNA, 32 nt, Human
uuccggaggagacgggggcagcuuggcuugag

SEQ ID NO: 536298 - RNA, 32 nt, Human
uuccggaggcugaggccaggaggaugggugga

SEQ ID NO: 536299 - RNA, 32 nt, Human
uuccggagucaggcaggaaggagaagcacagc

SEQ ID NO: 536300 - RNA, 32 nt, Human
uuccggcccacaccuauggcucaggccgaggc

SEQ ID NO: 536301 - RNA, 24 nt, Human
uuccggccugaggaagaagaggca

SEQ ID NO: 536302 - RNA, 32 nt, Human
uuccggcuccucccucuccuugugccucagcg

SEQ ID NO: 536303 - RNA, 32 nt, Human
uuccggcugugugcagcaugggugauaaggaa

SEQ ID NO: 536304 - RNA, 32 nt, Human
uuccgggaaggaacugaccagcgacugagcgg

SEQ ID NO: 536305 - RNA, 23 nt, Human
uuccgggaaugacagauaccuca

SEQ ID NO: 536306 - RNA, 15 nt, Human
uuccgggacagggag

SEQ ID NO: 536307 - RNA, 32 nt, Human
uuccgggagcccagagagcauguggcaggcag

SEQ ID NO: 536308 - RNA, 32 nt, Human
uuccgggcaacuuugaaaacaaacccuggucu

SEQ ID NO: 536309 - RNA, 24 nt, Human
uuccgggccuccucccgggccuca

SEQ ID NO: 536310 - RNA, 32 nt, Human
uuccgggccucgcuucccccagccccugcgcc

SEQ ID NO: 536311 - RNA, 32 nt, Human
uuccgggcucaagcgauucuccagccucagcc

SEQ ID NO: 536312 - RNA, 32 nt, Human
uuccgggcucggcuugaccuuuuccuaccuag

SEQ ID NO: 536313 - RNA, 32 nt, Human
uuccgggggccaggcggccgccgcgagucugg

SEQ ID NO: 536314 - RNA, 32 nt, Human
uuccgggggccuucccucgggucccuggcaga

SEQ ID NO: 536315 - RNA, 32 nt, Human
uuccgggggcugcaccugccugccuuugccua

SEQ ID NO: 536316 - RNA, 32 nt, Human
uuccggggucucugcucuuaugcaucaggacg

SEQ ID NO: 536317 - RNA, 32 nt, Human
uuccggguagcugggacuacaggugugcacca

SEQ ID NO: 536318 - RNA, 32 nt, Human
uuccggguccaaguccaugagcucucggcccu

SEQ ID NO: 536319 - RNA, 32 nt, Human
uuccgggugugcccugucccagaagauggaau

SEQ ID NO: 536320 - RNA, 32 nt, Human
uuccggguucaagugauucuccuaucucagcc

SEQ ID NO: 536321 - RNA, 32 nt, Human
uuccggguucaagugauucucgugccucagcc

SEQ ID NO: 536322 - RNA, 32 nt, Human
uuccggguucacaccauucuccugccucagcc

SEQ ID NO: 536323 - RNA, 32 nt, Human
uuccggguucaugccauucuccugccucagcc

SEQ ID NO: 536324 - RNA, 32 nt, Human
uuccggguuuguggcugcuuggcuccacacgu

SEQ ID NO: 536325 - RNA, 32 nt, Human
uuccgguauucugaggaugacguggccacuua

SEQ ID NO: 536326 - RNA, 32 nt, Human
uuccggugaagcggaggugugguggggcuugc

SEQ ID NO: 536327 - RNA, 32 nt, Human
uuccguaggcaauaacgugcguccgccucagc

SEQ ID NO: 536328 - RNA, 23 nt, Human
uuccgucagagcuucuggcugcu

SEQ ID NO: 536329 - RNA, 32 nt, Human
uuccguccugggaacugucagucugggagagc

SEQ ID NO: 536330 - RNA, 32 nt, Human
uuccgucgccacccucucuggacagcccaggg

SEQ ID NO: 536331 - RNA, 32 nt, Human
uuccgugaauguauauugucuuguaauguugc

SEQ ID NO: 536332 - RNA, 32 nt, Human
uuccgugauguaggguaaggugccuucuuauu

SEQ ID NO: 536333 - RNA, 32 nt, Human
uuccgugcucuucugcagucuuuguaugcuac

SEQ ID NO: 536334 - RNA, 32 nt, Human
uuccgugcuggcauauuuuggaauucuucaca

SEQ ID NO: 536335 - RNA, 32 nt, Human
uuccguggaggcgcagcccccaugcuccgugg

SEQ ID NO: 536336 - RNA, 32 nt, Human
uuccguggcccagggagguguuugcuguccga

SEQ ID NO: 536337 - RNA, 32 nt, Human
uuccguggggccaucuccucagcuucacagaa

SEQ ID NO: 536338 - RNA, 32 nt, Human
uuccguggguuuccccuuugauucuguaaaua

SEQ ID NO: 536339 - RNA, 32 nt, Human
uuccgugugccagcacuagccuaggagguuuu

SEQ ID NO: 536340 - RNA, 32 nt, Human
uuccguguggauggaucacaucccgagggugg

SEQ ID NO: 536341 - RNA, 32 nt, Human
uuccguguuuggcugaaccugggagaccagcu

SEQ ID NO: 536342 - RNA, 32 nt, Human
uuccguuccuggaucuacggagucuucuaaga

SEQ ID NO: 536343 - RNA, 32 nt, Human
uuccguugacucagugcugcugcuccagggug

SEQ ID NO: 536344 - RNA, 32 nt, Human
uuccguugucccuucgcgccccaaaccacauc

SEQ ID NO: 536345 - RNA, 32 nt, Human
uuccguuuccgacuugggguucaggcaggcug

SEQ ID NO: 536346 - RNA, 32 nt, Human
uuccguuucucauucuuggucuugagcugguc

SEQ ID NO: 536347 - RNA, 32 nt, Human
uuccguuugaggucagacacacaaaaccuucg

SEQ ID NO: 536348 - RNA, 32 nt, Human
uuccuaaaagauggaaacaggaaaguagguag

SEQ ID NO: 536349 - RNA, 32 nt, Human
uuccuaaagauuagagaucauuucucauucuc

SEQ ID NO: 536350 - RNA, 32 nt, Human
uuccuaaaggaaaugcccccggggaggacauu

SEQ ID NO: 536351 - RNA, 32 nt, Human
uuccuaaagugcugggauuacaggcgugagcc

SEQ ID NO: 536352 - RNA, 32 nt, Human
uuccuaaagugcugggauuacuggcaugagug

SEQ ID NO: 536353 - RNA, 32 nt, Human
uuccuaaagugcugggauugcaggcgugagcc

SEQ ID NO: 536354 - RNA, 32 nt, Human
uuccuaaaguguugggauuacaggcuugagcc

SEQ ID NO: 536355 - RNA, 32 nt, Human
uuccuaaauagcuggaauuacaggugugagcc

SEQ ID NO: 536356 - RNA, 32 nt, Human
uuccuaaauauuugcuacacacacagcuguau

SEQ ID NO: 536357 - RNA, 32 nt, Human
uuccuaaaugacugcauaggacagaucccauc

SEQ ID NO: 536358 - RNA, 32 nt, Human
uuccuaaaugauuuugaagggaaaguacuauu

SEQ ID NO: 536359 - RNA, 32 nt, Human
uuccuaaaugggaugcaaaaagaaacugaaug

SEQ ID NO: 536360 - RNA, 24 nt, Human
uuccuaaauuguuacaaugcuuua

SEQ ID NO: 536361 - RNA, 32 nt, Human
uuccuaacaaaccuuaccucagcugaaaugga

SEQ ID NO: 536362 - RNA, 32 nt, Human
uuccuaacacccacugaauggaaagcaggaag

SEQ ID NO: 536363 - RNA, 32 nt, Human
uuccuaaccagccuggucaacauggugaaacc

SEQ ID NO: 536364 - RNA, 32 nt, Human
uuccuaacucggccucacgucacagagcguca

SEQ ID NO: 536365 - RNA, 32 nt, Human
uuccuaacugcuacaaauacucuuaggaagag

SEQ ID NO: 536366 - RNA, 32 nt, Human
uuccuaagaagaggaaaauagcagaagagaag

SEQ ID NO: 536367 - RNA, 32 nt, Human
uuccuaagagccucuuuccuucauaccaucuu

SEQ ID NO: 536368 - RNA, 32 nt, Human
uuccuaagauuuccuuggguaucugguuuuug

SEQ ID NO: 536369 - RNA, 32 nt, Human
uuccuaaggaacagacuuaaguaugcccugac

SEQ ID NO: 536370 - RNA, 32 nt, Human
uuccuaaggaacagacuuaaguaugcccugga

SEQ ID NO: 536371 - RNA, 32 nt, Human
uuccuaaggacuccugaugucaucucaccagg

SEQ ID NO: 536372 - RNA, 32 nt, Human
uuccuaaggagauuuauauucuggccuacaca

SEQ ID NO: 536373 - RNA, 20 nt, Human
uuccuaaggcccagcugcca

SEQ ID NO: 536374 - RNA, 32 nt, Human
uuccuaaggccuucccaggagccaagcagaug

SEQ ID NO: 536375 - RNA, 32 nt, Human
uuccuaagggaugcaggaaggggccgggugaa

SEQ ID NO: 536376 - RNA, 32 nt, Human
uuccuaaguagcugggauuacaggcgugcgcc

SEQ ID NO: 536377 - RNA, 32 nt, Human
uuccuaaguagcuggguuuacaggcacccacc

SEQ ID NO: 536378 - RNA, 31 nt, Human
uuccuaagugagagagagccuggcugaagcu

SEQ ID NO: 536379 - RNA, 23 nt, Human
uuccuaaguggagauggccugua

SEQ ID NO: 536380 - RNA, 32 nt, Human
uuccuaaguugcuguccagccucagugacccc

SEQ ID NO: 536381 - RNA, 32 nt, Human
uuccuaaguuuuuguuaguugugucuucgaau

SEQ ID NO: 536382 - RNA, 32 nt, Human
uuccuacagaaaugacaacaugcgugugcaaa

SEQ ID NO: 536383 - RNA, 32 nt, Human
uuccuacagaugugccagcuugauuccuacca

SEQ ID NO: 536384 - RNA, 32 nt, Human
uuccuacagcagcaguccuuggaguugcuggc

SEQ ID NO: 536385 - RNA, 32 nt, Human
uuccuacaggcagagucaggccacacuggccc

SEQ ID NO: 536386 - RNA, 32 nt, Human
uuccuacaggcagagucaggccgcacuggccc

SEQ ID NO: 536387 - RNA, 32 nt, Human
uuccuacaggcagagucaggccgcacuggccu

SEQ ID NO: 536388 - RNA, 32 nt, Human
uuccuacaggggguggagagaccagccuuucu

SEQ ID NO: 536389 - RNA, 32 nt, Human
uuccuacauagaacauguauauucuacaaucu

SEQ ID NO: 536390 - RNA, 32 nt, Human
uuccuacaucuucucuucaccuaucccuugua

SEQ ID NO: 536391 - RNA, 32 nt, Human
uuccuaccagugucugcuauuuugaagaagcu

SEQ ID NO: 536392 - RNA, 32 nt, Human
uuccuacccaggcugccuggccggggccacug

SEQ ID NO: 536393 - RNA, 32 nt, Human
uuccuacccaggcugccuggcuggggccacug

SEQ ID NO: 536394 - RNA, 32 nt, Human
uuccuaccccuguucccuccccaaacccuauc

SEQ ID NO: 536395 - RNA, 24 nt, Human
uuccuacccuaccucggggaccug

SEQ ID NO: 536396 - RNA, 32 nt, Human
uuccuaccuaucccaccuccaucccagacagg

SEQ ID NO: 536397 - RNA, 32 nt, Human
uuccuaccugacuaugcuuucucuccuaggag

SEQ ID NO: 536398 - RNA, 32 nt, Human
uuccuaccugcagauccaggggcugcuguugc

SEQ ID NO: 536399 - RNA, 32 nt, Human
uuccuacguccaacugccguucacaacugccc

SEQ ID NO: 536400 - RNA, 32 nt, Human
uuccuacguuuuucuauguaauauuauuccau

SEQ ID NO: 536401 - RNA, 32 nt, Human
uuccuacuccacccuguaacauucagucuccu

SEQ ID NO: 536402 - RNA, 32 nt, Human
uuccuacucuacaauccuuuccucgaccaacg

SEQ ID NO: 536403 - RNA, 32 nt, Human
uuccuacucugaguuacugguuaccuagccag

SEQ ID NO: 536404 - RNA, 32 nt, Human
uuccuacugccuccacuucauguuauuuucuu

SEQ ID NO: 536405 - RNA, 32 nt, Human
uuccuacugucaucuuggagaaacccagucac

SEQ ID NO: 536406 - RNA, 32 nt, Human
uuccuacuuguccagguggagugagucugagg

SEQ ID NO: 536407 - RNA, 32 nt, Human
uuccuacuuugagggucucaucaugcccacug

SEQ ID NO: 536408 - RNA, 32 nt, Human
uuccuagaagcagccuuugcugucuuuuuaca

SEQ ID NO: 536409 - RNA, 32 nt, Human
uuccuagagacaggauuucgccauguugccug

SEQ ID NO: 536410 - RNA, 32 nt, Human
uuccuagagaugcagaacugggcccguggagc

SEQ ID NO: 536411 - RNA, 32 nt, Human
uuccuagagccuuauuagaaaugcagaaucug

SEQ ID NO: 536412 - RNA, 32 nt, Human
uuccuagaggcagagguugaagauggaagagg

SEQ ID NO: 536413 - RNA, 32 nt, Human
uuccuagcauaucccagagaacucauuugcca

SEQ ID NO: 536414 - RNA, 24 nt, Human
uuccuagccauugcugauguuuua

SEQ ID NO: 536415 - RNA, 32 nt, Human
uuccuagcccuucccccuccccaagacugugg

SEQ ID NO: 536416 - RNA, 32 nt, Human
uuccuagcuauccucugaaaacaguaugaaac

SEQ ID NO: 536417 - RNA, 32 nt, Human
uuccuaggagagugucuguuugcaugauaugu

SEQ ID NO: 536418 - RNA, 32 nt, Human
uuccuaggaggaaguagcaccacuggagcaga

SEQ ID NO: 536419 - RNA, 32 nt, Human
uuccuaggaguuguucuguccaccuguagacc

SEQ ID NO: 536420 - RNA, 32 nt, Human
uuccuagggaaagcuaagggagagggaauaug

SEQ ID NO: 536421 - RNA, 32 nt, Human
uuccuagggagaagcaggauacuuucccucag

SEQ ID NO: 536422 - RNA, 32 nt, Human
uuccuaggggacccugagcuuggcucccagga

SEQ ID NO: 536423 - RNA, 32 nt, Human
uuccuagguugcaguucagggaagggaaacaa

SEQ ID NO: 536424 - RNA, 32 nt, Human
uuccuaguaggaacuucuuccucuucagcccg

SEQ ID NO: 536425 - RNA, 32 nt, Human
uuccuagucuggagaggauauggaaauuuguu

SEQ ID NO: 536426 - RNA, 32 nt, Human
uuccuagugugggccaggaacaggacagggag

SEQ ID NO: 536427 - RNA, 32 nt, Human
uuccuaguucccauucuccuuuauuuucuucc

SEQ ID NO: 536428 - RNA, 32 nt, Human
uuccuauauuucuucuggaaucauguucgcuu

SEQ ID NO: 536429 - RNA, 32 nt, Human
uuccuaucacucaaggccccagccuggcacaa

SEQ ID NO: 536430 - RNA, 32 nt, Human
uuccuaucaggacuguguaugucugagcacau

SEQ ID NO: 536431 - RNA, 32 nt, Human
uuccuaucaugcuucaugugucauuccaaggu

SEQ ID NO: 536432 - RNA, 32 nt, Human
uuccuaucauucagaucuuccuuccucccaag

SEQ ID NO: 536433 - RNA, 32 nt, Human
uuccuaucauucuccaaaggccuccgcaauua

SEQ ID NO: 536434 - RNA, 32 nt, Human
uuccuaucccugggugcaugugcauucagaaa

SEQ ID NO: 536435 - RNA, 32 nt, Human
uuccuaucucuagcaaccuccugggccccaug

SEQ ID NO: 536436 - RNA, 32 nt, Human
uuccuaucuggcauuuccaucuugccccuggu

SEQ ID NO: 536437 - RNA, 32 nt, Human
uuccuaugcauacucuagaaucauauugucua

SEQ ID NO: 536438 - RNA, 32 nt, Human
uuccuaugguaauuaggagcaaaugaguuauu

SEQ ID NO: 536439 - RNA, 32 nt, Human
uuccuauguagaaggcucaguguuagaaauaa

SEQ ID NO: 536440 - RNA, 32 nt, Human
uuccuauucucagaccaugccaguggcaaccu

SEQ ID NO: 536441 - RNA, 32 nt, Human
uuccuauucucagaccaugccaguggccaccu

SEQ ID NO: 536442 - RNA, 32 nt, Human
uuccuauugcaaccucgugcacugcucgagac

SEQ ID NO: 536443 - RNA, 32 nt, Human
uuccuauugcccuuucuuuucacccaccauuc

SEQ ID NO: 536444 - RNA, 32 nt, Human
uuccuauuucaaccucugguuccugggaugag

SEQ ID NO: 536445 - RNA, 32 nt, Human
uuccuauuucaggaaagggaaauggugucacu

SEQ ID NO: 536446 - RNA, 19 nt, Human
uuccuauuucuggcugccu

SEQ ID NO: 536447 - RNA, 32 nt, Human
uuccuauuugaauuucuuuggugcuguagaaa

SEQ ID NO: 536448 - RNA, 26 nt, Human
uuccucaaauaacaaagaaaaaugau

SEQ ID NO: 536449 - RNA, 32 nt, Human
uuccucaaccauaaaaugaagauaauaaugcc

SEQ ID NO: 536450 - RNA, 32 nt, Human
uuccucaacugccccaaaucucuuaauagcuu

SEQ ID NO: 536451 - RNA, 32 nt, Human
uuccucaagacaaaugguaauuugcuaggcac

SEQ ID NO: 536452 - RNA, 32 nt, Human
uuccucaaggaggugaaggucaugcgaugccu

SEQ ID NO: 536453 - RNA, 31 nt, Human
uuccucaaguaauauaccuguuugaagcuuu

SEQ ID NO: 536454 - RNA, 32 nt, Human
uuccucaagucaagcguuccaggcccagauca

SEQ ID NO: 536455 - RNA, 32 nt, Human
uuccucaaguuaguuauguuguaggaguguac

SEQ ID NO: 536456 - RNA, 32 nt, Human
uuccucaauccuuacuaaacauucauguaauu

SEQ ID NO: 536457 - RNA, 23 nt, Human
uuccucacacaccgcagcaaaga

SEQ ID NO: 536458 - RNA, 32 nt, Human
uuccucacauagagucauuguauuccaccugu

SEQ ID NO: 536459 - RNA, 32 nt, Human
uuccucaccaauaacuucagagaagucaguug

SEQ ID NO: 536460 - RNA, 32 nt, Human
uuccucacccaaauuacuauguuuccacaaga

SEQ ID NO: 536461 - RNA, 32 nt, Human
uuccucacccccagugccuggacccggaggug

SEQ ID NO: 536462 - RNA, 18 nt, Human
uuccucaccccucuccca

SEQ ID NO: 536463 - RNA, 32 nt, Human
uuccucaccgauggagaauuacuuccaagcag

SEQ ID NO: 536464 - RNA, 32 nt, Human
uuccucaccuggcuugggccacugugcacagc

SEQ ID NO: 536465 - RNA, 32 nt, Human
uuccucacucacugcaacuggaucuucagccu

SEQ ID NO: 536466 - RNA, 32 nt, Human
uuccucacuccauccagccucuugacaagcac

SEQ ID NO: 536467 - RNA, 32 nt, Human
uuccucacuccuccugccuccacccccuacca

SEQ ID NO: 536468 - RNA, 32 nt, Human
uuccucacugcaccuagucagacugugggcau

SEQ ID NO: 536469 - RNA, 32 nt, Human
uuccucagcccuggaugaaguggagaagaccu

SEQ ID NO: 536470 - RNA, 32 nt, Human
uuccucagccuccugaguagcugggauuacag

SEQ ID NO: 536471 - RNA, 32 nt, Human
uuccucagccuccugaguagcugggauuaugg

SEQ ID NO: 536472 - RNA, 32 nt, Human
uuccucagcucccuucugccccucucuaccuc

SEQ ID NO: 536473 - RNA, 30 nt, Human
uuccucagcuucuccauguuuaggaacuga

SEQ ID NO: 536474 - RNA, 32 nt, Human
uuccucaggagagguugagucuaccuaggacc

SEQ ID NO: 536475 - RNA, 32 nt, Human
uuccucaggagcccucacucugccuguggacg

SEQ ID NO: 536476 - RNA, 32 nt, Human
uuccucaggcuaagcugccgguucuuaaaucc

SEQ ID NO: 536477 - RNA, 32 nt, Human
uuccucaggcuguuaccugcccccucaggccc

SEQ ID NO: 536478 - RNA, 32 nt, Human
uuccucagggccuucucccagagacagccugg

SEQ ID NO: 536479 - RNA, 32 nt, Human
uuccucagggcuuagggagggagggaggacau

SEQ ID NO: 536480 - RNA, 32 nt, Human
uuccucagugcaggggugcaucagggccucaa

SEQ ID NO: 536481 - RNA, 32 nt, Human
uuccucagugccuguccauaacugugaaguau

SEQ ID NO: 536482 - RNA, 31 nt, Human
uuccucaguuucucuggguuuuggugucuca

SEQ ID NO: 536483 - RNA, 32 nt, Human
uuccucaguuuuucuuccucagaauaaauggg

SEQ ID NO: 536484 - RNA, 32 nt, Human
uuccucauaauggccagcauuuugggcuacaa

SEQ ID NO: 536485 - RNA, 32 nt, Human
uuccucaucagagguggacaagcccuaugggc

SEQ ID NO: 536486 - RNA, 32 nt, Human
uuccucauccaccgcugcugagucucagaaac

SEQ ID NO: 536487 - RNA, 16 nt, Human
uuccucauccccccuc

SEQ ID NO: 536488 - RNA, 32 nt, Human
uuccucaucugcagcuacgccuggguguggug

SEQ ID NO: 536489 - RNA, 32 nt, Human
uuccucaucugucaggagugccauuaaaggag

SEQ ID NO: 536490 - RNA, 32 nt, Human
uuccucaucuuccuccucuuccuucuuuuucu

SEQ ID NO: 536491 - RNA, 32 nt, Human
uuccucaucuuccucuugcugcugccauguaa

SEQ ID NO: 536492 - RNA, 24 nt, Human
uuccucauuccauugccccagguc

SEQ ID NO: 536493 - RNA, 32 nt, Human
uuccucauugacugacucugugccacgucauc

SEQ ID NO: 536494 - RNA, 32 nt, Human
uuccucauuuuacuuuuaaacuggugguaaag

SEQ ID NO: 536495 - RNA, 32 nt, Human
uuccucauuuuguuugacaggguccucaguac

SEQ ID NO: 536496 - RNA, 32 nt, Human
uuccuccaaaugcuaugagagcaggggaguaa

SEQ ID NO: 536497 - RNA, 32 nt, Human
uuccuccaaugccuggugauucuugaaugucu

SEQ ID NO: 536498 - RNA, 32 nt, Human
uuccuccaaugugcuuucacagcuucacuucc

SEQ ID NO: 536499 - RNA, 32 nt, Human
uuccuccacaaaaugauccucagucuguaauu

SEQ ID NO: 536500 - RNA, 32 nt, Human
uuccuccacaaacagcucuucauaacaugggc

SEQ ID NO: 536501 - RNA, 32 nt, Human
uuccuccaccaagcuccugugugagcugcagc

SEQ ID NO: 536502 - RNA, 24 nt, Human
uuccuccacccaggguugacucag

SEQ ID NO: 536503 - RNA, 32 nt, Human
uuccuccacccuaagcccuggggcccugaaau

SEQ ID NO: 536504 - RNA, 19 nt, Human
uuccuccaccugcuggguc

SEQ ID NO: 536505 - RNA, 32 nt, Human
uuccuccacugcauugccauccuccccaaagc

SEQ ID NO: 536506 - RNA, 32 nt, Human
uuccuccagaacugagcccuuuguuggaacca

SEQ ID NO: 536507 - RNA, 32 nt, Human
uuccuccagaccgcaggcucccccagccucag

SEQ ID NO: 536508 - RNA, 23 nt, Human
uuccuccagagacacugagccag

SEQ ID NO: 536509 - RNA, 32 nt, Human
uuccuccagagcagagaaacgccugaccugcc

SEQ ID NO: 536510 - RNA, 32 nt, Human
uuccuccagcaacccauaccuaauaagaagga

SEQ ID NO: 536511 - RNA, 32 nt, Human
uuccuccagcuauccucagggaagcuggagau

SEQ ID NO: 536512 - RNA, 32 nt, Human
uuccuccagcucuuccugagaccaggguuucc

SEQ ID NO: 536513 - RNA, 32 nt, Human
uuccuccagcuuuccugagagaaacaggucaa

SEQ ID NO: 536514 - RNA, 32 nt, Human
uuccuccaggaucauggugaagaugacaugag

SEQ ID NO: 536515 - RNA, 32 nt, Human
uuccuccagggugggaagcacggggagcaaug

SEQ ID NO: 536516 - RNA, 32 nt, Human
uuccuccaggucuuugauuggagagaguaacu

SEQ ID NO: 536517 - RNA, 32 nt, Human
uuccuccaucagccuggcuggcagcagccuug

SEQ ID NO: 536518 - RNA, 32 nt, Human
uuccuccauccugucuggaauacaccagguca

SEQ ID NO: 536519 - RNA, 32 nt, Human
uuccuccaugcaucuugcccaggaucacucag

SEQ ID NO: 536520 - RNA, 32 nt, Human
uuccuccaugggcgcucagccuggggaaccuc

SEQ ID NO: 536521 - RNA, 32 nt, Human
uuccuccauguauuuacuccauuuuucucuau

SEQ ID NO: 536522 - RNA, 32 nt, Human
uuccucccaaagugcugggauuaauggcguga

SEQ ID NO: 536523 - RNA, 32 nt, Human
uuccucccaagaaacagcagcucaaacagugg

SEQ ID NO: 536524 - RNA, 32 nt, Human
uuccucccaaguagcugcaacuaugggcauac

SEQ ID NO: 536525 - RNA, 32 nt, Human
uuccucccacuauuuucucuucgcaggacaug

SEQ ID NO: 536526 - RNA, 32 nt, Human
uuccucccagacccauaacccuugucuuagua

SEQ ID NO: 536527 - RNA, 32 nt, Human
uuccucccagcccuguaaauucuaucuuugau

SEQ ID NO: 536528 - RNA, 32 nt, Human
uuccucccagcugggucuacagucccaucucc

SEQ ID NO: 536529 - RNA, 32 nt, Human
uuccucccaguuccagagcaccccaggauaac

SEQ ID NO: 536530 - RNA, 32 nt, Human
uuccucccaugcacuccuagggugaaugggcu

SEQ ID NO: 536531 - RNA, 32 nt, Human
uuccucccaugcacuccuaggugaaugggcuc

SEQ ID NO: 536532 - RNA, 32 nt, Human
uuccuccccaacaaaagaggcuuuucuucuua

SEQ ID NO: 536533 - RNA, 32 nt, Human
uuccuccccacucugucuuucucaccucuccu

SEQ ID NO: 536534 - RNA, 32 nt, Human
uuccuccccacuucaccaacacugccuuccuc

SEQ ID NO: 536535 - RNA, 32 nt, Human
uuccuccccagcagccgggucucuccagaccc

SEQ ID NO: 536536 - RNA, 19 nt, Human
uuccuccccaggagugaaa

SEQ ID NO: 536537 - RNA, 24 nt, Human
uuccuccccauccuggagaaugac

SEQ ID NO: 536538 - RNA, 32 nt, Human
uuccuccccgccuuccgccccuucccuucccu

SEQ ID NO: 536539 - RNA, 32 nt, Human
uuccuccccuagcaccugggcuuggcagaagg

SEQ ID NO: 536540 - RNA, 32 nt, Human
uuccuccccuccuccuccucuccaauucgccu

SEQ ID NO: 536541 - RNA, 32 nt, Human
uuccuccccugcccugcuucccuuccuccacc

SEQ ID NO: 536542 - RNA, 32 nt, Human
uuccuccccugccuccuuagaacacacucuaa

SEQ ID NO: 536543 - RNA, 32 nt, Human
uuccuccccuuucuacugcucucccauuuucc

SEQ ID NO: 536544 - RNA, 32 nt, Human
uuccucccgcagccccugcuacugagaagcuc

SEQ ID NO: 536545 - RNA, 32 nt, Human
uuccucccuccccucucccucccccucccccg

SEQ ID NO: 536546 - RNA, 32 nt, Human
uuccucccuccccuuaguugucuaugacuuuu

SEQ ID NO: 536547 - RNA, 32 nt, Human
uuccucccucuccucugcuuccagcaugcucu

SEQ ID NO: 536548 - RNA, 32 nt, Human
uuccucccucucucccugauguaggccuuggc

SEQ ID NO: 536549 - RNA, 31 nt, Human
uuccucccucucucugggcuuuguccugaga

SEQ ID NO: 536550 - RNA, 32 nt, Human
uuccucccugcaggagcuucccaagcugguca

SEQ ID NO: 536551 - RNA, 22 nt, Human
uuccucccuguccccacgacca

SEQ ID NO: 536552 - RNA, 32 nt, Human
uuccucccuuccuccucuccccacuccuuucc

SEQ ID NO: 536553 - RNA, 32 nt, Human
uuccucccuuucucccucucucccucuuccuc

SEQ ID NO: 536554 - RNA, 32 nt, Human
uuccucccuuucuccuucuccccuccuucuuu

SEQ ID NO: 536555 - RNA, 32 nt, Human
uuccucccuuucucucuguuucuguuccucuc

SEQ ID NO: 536556 - RNA, 32 nt, Human
uuccucccuuugcccaguagccacaucugguu

SEQ ID NO: 536557 - RNA, 32 nt, Human
uuccuccgcacugcaaacacauauaugugcgc

SEQ ID NO: 536558 - RNA, 32 nt, Human
uuccuccgucaccucagagacauacaccuaug

SEQ ID NO: 536559 - RNA, 32 nt, Human
uuccuccguucccaguccacuucucuagggcc

SEQ ID NO: 536560 - RNA, 32 nt, Human
uuccuccuaccugaccaggccauguccucucu

SEQ ID NO: 536561 - RNA, 32 nt, Human
uuccuccuagguaaaguccauggccauaucuu

SEQ ID NO: 536562 - RNA, 32 nt, Human
uuccuccucacugcauccccaauccccuuccc

SEQ ID NO: 536563 - RNA, 32 nt, Human
uuccuccucauugaagccaugccaucaccuug

SEQ ID NO: 536564 - RNA, 32 nt, Human
uuccuccuccagccucccuuggguuuucuuuu

SEQ ID NO: 536565 - RNA, 32 nt, Human
uuccuccuccaucaccugaaacacuggaccug

SEQ ID NO: 536566 - RNA, 32 nt, Human
uuccuccuccccaaggagcauaaugugauggu

SEQ ID NO: 536567 - RNA, 32 nt, Human
uuccuccuccuccuccuccucugguagagcac

SEQ ID NO: 536568 - RNA, 32 nt, Human
uuccuccuccuccuccucucccuccuccuccu

SEQ ID NO: 536569 - RNA, 32 nt, Human
uuccuccuccuccuccucucuaggcacccccg

SEQ ID NO: 536570 - RNA, 32 nt, Human
uuccuccuccucggccucaccauuccagacca

SEQ ID NO: 536571 - RNA, 32 nt, Human
uuccuccuccuugggccaugcaacgggaugaa

SEQ ID NO: 536572 - RNA, 32 nt, Human
uuccuccucuacugcucccucccucucuugcc

SEQ ID NO: 536573 - RNA, 32 nt, Human
uuccuccucuccucccuguccugagccuuagc

SEQ ID NO: 536574 - RNA, 32 nt, Human
uuccuccucugccuccccuuccccuccucucc

SEQ ID NO: 536575 - RNA, 32 nt, Human
uuccuccucuuccuccuccuccucuuccucau

SEQ ID NO: 536576 - RNA, 32 nt, Human
uuccuccucuucucagagaccucccuuuccaa

SEQ ID NO: 536577 - RNA, 32 nt, Human
uuccuccugacggcacucccaccuucaucauu

SEQ ID NO: 536578 - RNA, 32 nt, Human
uuccuccugagccagcccagacucggccugga

SEQ ID NO: 536579 - RNA, 32 nt, Human
uuccuccugaguagcugauuuucagaauuugg

SEQ ID NO: 536580 - RNA, 32 nt, Human
uuccuccugcagcugcugggccuuugccucug

SEQ ID NO: 536581 - RNA, 32 nt, Human
uuccuccugcaucuccccuucuuuccuucccc

SEQ ID NO: 536582 - RNA, 32 nt, Human
uuccuccugccaccccuccuguuccugcagcc

SEQ ID NO: 536583 - RNA, 32 nt, Human
uuccuccugccuggaccaugguagcuucugug

SEQ ID NO: 536584 - RNA, 32 nt, Human
uuccuccugcuccccuugacuuuuuccccuga

SEQ ID NO: 536585 - RNA, 32 nt, Human
uuccuccugggaaauuccaguaagggcgcgga

SEQ ID NO: 536586 - RNA, 32 nt, Human
uuccuccugggaagaugcagaggcucaugaug

SEQ ID NO: 536587 - RNA, 32 nt, Human
uuccuccugggaucuggcccuccagggaagug

SEQ ID NO: 536588 - RNA, 32 nt, Human
uuccuccugggcaacagagugagacccuauca

SEQ ID NO: 536589 - RNA, 32 nt, Human
uuccuccuggugcccugaaggcugcgauggcc

SEQ ID NO: 536590 - RNA, 31 nt, Human
uuccuccuuagugccaucacagcaggugaau

SEQ ID NO: 536591 - RNA, 32 nt, Human
uuccuccuucacccccaauccccaugccaguu

SEQ ID NO: 536592 - RNA, 32 nt, Human
uuccuccuucacuguuucaucuaagugccuca

SEQ ID NO: 536593 - RNA, 32 nt, Human
uuccuccuuccaggaacugguuucuugcgcgg

SEQ ID NO: 536594 - RNA, 32 nt, Human
uuccuccuugccacccuuccagccuuccaggc

SEQ ID NO: 536595 - RNA, 32 nt, Human
uuccuccuugccuucccuucugugugaccgac

SEQ ID NO: 536596 - RNA, 32 nt, Human
uuccuccuuuccaauuuggaugccuuagauuu

SEQ ID NO: 536597 - RNA, 32 nt, Human
uuccuccuuucucuuucguuacagaagcccca

SEQ ID NO: 536598 - RNA, 32 nt, Human
uuccuccuuugggcaucucuucugccucccaa

SEQ ID NO: 536599 - RNA, 32 nt, Human
uuccuccuuuucagaacuacucugugcuaauu

SEQ ID NO: 536600 - RNA, 32 nt, Human
uuccucgaccaacgcaaccucuaguaccuuuc

SEQ ID NO: 536601 - RNA, 32 nt, Human
uuccucgcacccagaugguagccagucuucca

SEQ ID NO: 536602 - RNA, 32 nt, Human
uuccucgcacuucuccccacucgucaucuuuu

SEQ ID NO: 536603 - RNA, 32 nt, Human
uuccucgcgcccccuucagccacuccgacugc

SEQ ID NO: 536604 - RNA, 32 nt, Human
uuccucgcuccucugcuggguuaagccugcaa

SEQ ID NO: 536605 - RNA, 32 nt, Human
uuccucggaaacacucuugaaugucugaguga

SEQ ID NO: 536606 - RNA, 32 nt, Human
uuccucggagggcagacacagggaggaaggac

SEQ ID NO: 536607 - RNA, 32 nt, Human
uuccucggagguguuuauugaugcccagcugc

SEQ ID NO: 536608 - RNA, 32 nt, Human
uuccucggagugagagaaaacucuuuuuagau

SEQ ID NO: 536609 - RNA, 32 nt, Human
uuccucggauccacaauuaaagaauuaacagc

SEQ ID NO: 536610 - RNA, 32 nt, Human
uuccucggcccagggagaaagcaugucaggac

SEQ ID NO: 536611 - RNA, 32 nt, Human
uuccucgggcagcaggugggaagugggagccg

SEQ ID NO: 536612 - RNA, 32 nt, Human
uuccucgggguccgcggagcgagcccagcucu

SEQ ID NO: 536613 - RNA, 32 nt, Human
uuccucguaagauuucucccuauuucauacuc

SEQ ID NO: 536614 - RNA, 32 nt, Human
uuccucgucaguggucaaggugugucauccau

SEQ ID NO: 536615 - RNA, 32 nt, Human
uuccucguguccggaggcaugggugagcaugg

SEQ ID NO: 536616 - RNA, 32 nt, Human
uuccucguucugcucugaccucuuagcuuaga

SEQ ID NO: 536617 - RNA, 32 nt, Human
uuccucuaaagcagucuugggaagcuggauca

SEQ ID NO: 536618 - RNA, 22 nt, Human
uuccucuaacaccuuccaugua

SEQ ID NO: 536619 - RNA, 32 nt, Human
uuccucuaccugcccucuccccagcccucauc

SEQ ID NO: 536620 - RNA, 32 nt, Human
uuccucuagccucugcuggagugcagugagga

SEQ ID NO: 536621 - RNA, 32 nt, Human
uuccucuaggcagagaagaggcgauggcggcg

SEQ ID NO: 536622 - RNA, 32 nt, Human
uuccucuagggaggggauggggaggccuccua

SEQ ID NO: 536623 - RNA, 32 nt, Human
uuccucuauuccuuuauaugaucucuguauuu

SEQ ID NO: 536624 - RNA, 32 nt, Human
uuccucuauuugccugccaccucucuugucuc

SEQ ID NO: 536625 - RNA, 23 nt, Human
uuccucucacaaaggaaaaugac

SEQ ID NO: 536626 - RNA, 20 nt, Human
uuccucucacuccaagugac

SEQ ID NO: 536627 - RNA, 32 nt, Human
uuccucucagaagggagagagguuuucaggcu

SEQ ID NO: 536628 - RNA, 32 nt, Human
uuccucucagcuauaagccucuugccuucaag

SEQ ID NO: 536629 - RNA, 32 nt, Human
uuccucucauuauugagaacugugaguguuua

SEQ ID NO: 536630 - RNA, 32 nt, Human
uuccucuccaagcccuccucugaaccagcuau

SEQ ID NO: 536631 - RNA, 32 nt, Human
uuccucuccacgccagugucucuaauaaacuu

SEQ ID NO: 536632 - RNA, 32 nt, Human
uuccucuccagccagaggcugaccugagggcc

SEQ ID NO: 536633 - RNA, 32 nt, Human
uuccucuccagccagucuccuguggcucccug

SEQ ID NO: 536634 - RNA, 32 nt, Human
uuccucuccagccuucucucucuggucaggcc

SEQ ID NO: 536635 - RNA, 32 nt, Human
uuccucucccccagccucccaggcuggauggc

SEQ ID NO: 536636 - RNA, 32 nt, Human
uuccucucccucauaauucagcauuaaagaau

SEQ ID NO: 536637 - RNA, 32 nt, Human
uuccucuccuacugcuaauuuuuccguccucu

SEQ ID NO: 536638 - RNA, 32 nt, Human
uuccucuccuccuccuccuccuggguccccca

SEQ ID NO: 536639 - RNA, 32 nt, Human
uuccucuccucucuuccucucuucucucuucc

SEQ ID NO: 536640 - RNA, 32 nt, Human
uuccucuccucuucacuagccucucugaaggu

SEQ ID NO: 536641 - RNA, 20 nt, Human
uuccucuccuggacaaugac

SEQ ID NO: 536642 - RNA, 21 nt, Human
uuccucuccuucgaagaugac

SEQ ID NO: 536643 - RNA, 32 nt, Human
uuccucucggcuaucacucaccccuguccuca

SEQ ID NO: 536644 - RNA, 32 nt, Human
uuccucucucaccaccccaucucccucucuuc

SEQ ID NO: 536645 - RNA, 32 nt, Human
uuccucucucccaccagggggcgcgcuuaaau

SEQ ID NO: 536646 - RNA, 32 nt, Human
uuccucucuccccuccccaccucgcuucuucc

SEQ ID NO: 536647 - RNA, 32 nt, Human
uuccucucucccucuuucuccucucucaccca

SEQ ID NO: 536648 - RNA, 32 nt, Human
uuccucucuccuccuccuuccccauugcugua

SEQ ID NO: 536649 - RNA, 32 nt, Human
uuccucucuccucuccuccuuccugucuccuc

SEQ ID NO: 536650 - RNA, 32 nt, Human
uuccucucuccucuuugaugucaaacgccuug

SEQ ID NO: 536651 - RNA, 32 nt, Human
uuccucucuccugguuccuccccaucugccug

SEQ ID NO: 536652 - RNA, 32 nt, Human
uuccucucugagucccagcuauggggaacauc

SEQ ID NO: 536653 - RNA, 32 nt, Human
uuccucucugcugaggcagcugccuccugauc

SEQ ID NO: 536654 - RNA, 32 nt, Human
uuccucucuguccugucucugccaccuccaca

SEQ ID NO: 536655 - RNA, 32 nt, Human
uuccucucugucugucucucccccucugucuu

SEQ ID NO: 536656 - RNA, 21 nt, Human
uuccucucuuaaaaaauguac

SEQ ID NO: 536657 - RNA, 19 nt, Human
uuccucucuuccuccaggg

SEQ ID NO: 536658 - RNA, 32 nt, Human
uuccucucuuucucuuccccuuuccuucgcgc

SEQ ID NO: 536659 - RNA, 32 nt, Human
uuccucucuuuggucacauggcgucagaugaa

SEQ ID NO: 536660 - RNA, 32 nt, Human
uuccucugaaaaggaaugaacacgggaacccc

SEQ ID NO: 536661 - RNA, 32 nt, Human
uuccucugaagacugcuaucagucucuuggac

SEQ ID NO: 536662 - RNA, 32 nt, Human
uuccucugagguuugaggaugaagauaaguug

SEQ ID NO: 536663 - RNA, 32 nt, Human
uuccucugcacugggccguggaugacauuaca

SEQ ID NO: 536664 - RNA, 32 nt, Human
uuccucugccacucccugcugugugacuuugg

SEQ ID NO: 536665 - RNA, 32 nt, Human
uuccucugcccauucucccuugccaagaggaa

SEQ ID NO: 536666 - RNA, 32 nt, Human
uuccucugccuguacuacccccagaugcuuua

SEQ ID NO: 536667 - RNA, 32 nt, Human
uuccucugcucacucuuuuccugcucccaggc

SEQ ID NO: 536668 - RNA, 32 nt, Human
uuccucugcuccugcccacucugcuuccaccc

SEQ ID NO: 536669 - RNA, 32 nt, Human
uuccucugcuccugcugaucugugccacugaa

SEQ ID NO: 536670 - RNA, 32 nt, Human
uuccucugcucggcucugucauccccugacug

SEQ ID NO: 536671 - RNA, 32 nt, Human
uuccucugcugacccagcugggagggggagga

SEQ ID NO: 536672 - RNA, 32 nt, Human
uuccucugcuuuuccuccuuuuuaccaucuac

SEQ ID NO: 536673 - RNA, 32 nt, Human
uuccucuggaaagagaagucacacagacaauc

SEQ ID NO: 536674 - RNA, 32 nt, Human
uuccucuggcccucuccaggguguuuuccacu

SEQ ID NO: 536675 - RNA, 32 nt, Human
uuccucugggaaacugacagcugucuuccaca

SEQ ID NO: 536676 - RNA, 32 nt, Human
uuccucugggagcucugugccacugagguaug

SEQ ID NO: 536677 - RNA, 32 nt, Human
uuccucugggcaggggacagagagacacaggc

SEQ ID NO: 536678 - RNA, 32 nt, Human
uuccucugggcccuggcugugggcagaggcca

SEQ ID NO: 536679 - RNA, 32 nt, Human
uuccucuguaccacucugcuuccuuggacaau

SEQ ID NO: 536680 - RNA, 32 nt, Human
uuccucugucgcaaggaagugcaagcggagcu

SEQ ID NO: 536681 - RNA, 32 nt, Human
uuccucuguggcugaggugggagggggagggu

SEQ ID NO: 536682 - RNA, 32 nt, Human
uuccucuguggggcauuggauccucccacagu

SEQ ID NO: 536683 - RNA, 32 nt, Human
uuccucugugucaggugacaugguggcacccc

SEQ ID NO: 536684 - RNA, 32 nt, Human
uuccucuguuacaaccucagcacuuugcaccg

SEQ ID NO: 536685 - RNA, 18 nt, Human
uuccucuucaauuuuccc

SEQ ID NO: 536686 - RNA, 32 nt, Human
uuccucuuccaccaccaccaccggcugcccag

SEQ ID NO: 536687 - RNA, 32 nt, Human
uuccucuuccaucucucugucaccucccuccc

SEQ ID NO: 536688 - RNA, 32 nt, Human
uuccucuucccaaucagccucuacccauucuc

SEQ ID NO: 536689 - RNA, 32 nt, Human
uuccucuucccagcuuugcagcagguccucaa

SEQ ID NO: 536690 - RNA, 32 nt, Human
uuccucuuccucuccaaaccaccucgaagcag

SEQ ID NO: 536691 - RNA, 32 nt, Human
uuccucuuccucucuuaaaacuaucuuagaug

SEQ ID NO: 536692 - RNA, 32 nt, Human
uuccucuuccuuucccuuccuucucuuuucuu

SEQ ID NO: 536693 - RNA, 32 nt, Human
uuccucuucguuaagucggccuucccaacaug

SEQ ID NO: 536694 - RNA, 18 nt, Human
uuccucuucucccuugcc

SEQ ID NO: 536695 - RNA, 32 nt, Human
uuccucuucugccagagguggagggaggguug

SEQ ID NO: 536696 - RNA, 32 nt, Human
uuccucuucuuuuuccucugaccucugugacu

SEQ ID NO: 536697 - RNA, 32 nt, Human
uuccucuuggcacuucugggugugucagucau

SEQ ID NO: 536698 - RNA, 32 nt, Human
uuccucuugggcuuucagcccagacuccaagc

SEQ ID NO: 536699 - RNA, 32 nt, Human
uuccucuuuauggcugaauaauacugcauugu

SEQ ID NO: 536700 - RNA, 32 nt, Human
uuccucuuuccucugcugcuuuccuuccuucu

SEQ ID NO: 536701 - RNA, 32 nt, Human
uuccucuuucuuuccguuuccaaaggagcaag

SEQ ID NO: 536702 - RNA, 32 nt, Human
uuccucuuuucuugcugacccuucggagcucu

SEQ ID NO: 536703 - RNA, 27 nt, Human
uuccugaaagccaggccucgggaccug

SEQ ID NO: 536704 - RNA, 32 nt, Human
uuccugaaaggccagaaguucaaagauggacu

SEQ ID NO: 536705 - RNA, 19 nt, Human
uuccugaaauaccuagaaa

SEQ ID NO: 536706 - RNA, 32 nt, Human
uuccugaacaugucacuccacagcagaggacc

SEQ ID NO: 536707 - RNA, 32 nt, Human
uuccugaacugggguuugggugcacugagacg

SEQ ID NO: 536708 - RNA, 32 nt, Human
uuccugaagcugaagaaagaguaaaagccagg

SEQ ID NO: 536709 - RNA, 32 nt, Human
uuccugaagggcccucccaaggcuacaucccc

SEQ ID NO: 536710 - RNA, 32 nt, Human
uuccugaagguggccaagucauuguguuccca

SEQ ID NO: 536711 - RNA, 32 nt, Human
uuccugaagugcugggauuacaggcaugagcc

SEQ ID NO: 536712 - RNA, 32 nt, Human
uuccugaaguguuuauuuucucucauauccac

SEQ ID NO: 536713 - RNA, 32 nt, Human
uuccugaauaagaggaggugaugcaaauguau

SEQ ID NO: 536714 - RNA, 32 nt, Human
uuccugaaucucuguccugccacacauggucc

SEQ ID NO: 536715 - RNA, 32 nt, Human
uuccugaaugcuaggcuggaaaguggugccug

SEQ ID NO: 536716 - RNA, 32 nt, Human
uuccugacaccuggaacugugcaccuggcacc

SEQ ID NO: 536717 - RNA, 32 nt, Human
uuccugacacuaccagccugggaggcccaggu

SEQ ID NO: 536718 - RNA, 32 nt, Human
uuccugaccccaaggucagaggagacuauaua

SEQ ID NO: 536719 - RNA, 32 nt, Human
uuccugacccuccgcugcagaggauugaggcu

SEQ ID NO: 536720 - RNA, 31 nt, Human
uuccugacccucucugggcugcagucaccuu

SEQ ID NO: 536721 - RNA, 32 nt, Human
uuccugaccucagugauccacccaccuuggcc

SEQ ID NO: 536722 - RNA, 32 nt, Human
uuccugaccucguguccgcccaccucagccuc

SEQ ID NO: 536723 - RNA, 32 nt, Human
uuccugacugcacuggccuggcagucuggcug

SEQ ID NO: 536724 - RNA, 32 nt, Human
uuccugacugcagcucucuucauucugccaac

SEQ ID NO: 536725 - RNA, 23 nt, Human
uuccugacuucuaucugggcuug

SEQ ID NO: 536726 - RNA, 32 nt, Human
uuccugacuugccuuuucccuugagaagggga

SEQ ID NO: 536727 - RNA, 32 nt, Human
uuccugagaacuccggccccaggcuggccuga

SEQ ID NO: 536728 - RNA, 32 nt, Human
uuccugagaagagauggaaguggagcugugac

SEQ ID NO: 536729 - RNA, 32 nt, Human
uuccugagaagugaaugagucaacagcuuuca

SEQ ID NO: 536730 - RNA, 32 nt, Human
uuccugagacaaauacucacugaagggcuugu

SEQ ID NO: 536731 - RNA, 32 nt, Human
uuccugagagcccagccucucccuccaguacu

SEQ ID NO: 536732 - RNA, 32 nt, Human
uuccugagagguggugggcaggagggaggagu

SEQ ID NO: 536733 - RNA, 32 nt, Human
uuccugagagucucacucugucacccaggcug

SEQ ID NO: 536734 - RNA, 24 nt, Human
uuccugagaucuacccggggcuug

SEQ ID NO: 536735 - RNA, 23 nt, Human
uuccugagaugacugaguaugga

SEQ ID NO: 536736 - RNA, 32 nt, Human
uuccugagcccaagcuauccuccugccucagc

SEQ ID NO: 536737 - RNA, 32 nt, Human
uuccugagccccaccugcuucauggguuggcu

SEQ ID NO: 536738 - RNA, 32 nt, Human
uuccugagcuaaagcgaucugcccaccucggc

SEQ ID NO: 536739 - RNA, 32 nt, Human
uuccugagcuaaauggaaaugauaucauccca

SEQ ID NO: 536740 - RNA, 32 nt, Human
uuccugagcugcauuaaaguugaaccacuagg

SEQ ID NO: 536741 - RNA, 32 nt, Human
uuccugagcuuggucccugccuggugauucuu

SEQ ID NO: 536742 - RNA, 32 nt, Human
uuccugaggagaaaagccagaguggagucugg

SEQ ID NO: 536743 - RNA, 32 nt, Human
uuccugaggagagggguguauccaggcuuacc

SEQ ID NO: 536744 - RNA, 32 nt, Human
uuccugaggauguagucaaggaagaaaaaguu

SEQ ID NO: 536745 - RNA, 32 nt, Human
uuccugaggcaugaaaauucucagggacaaag

SEQ ID NO: 536746 - RNA, 32 nt, Human
uuccugaggcugcccucuccagucccaggagc

SEQ ID NO: 536747 - RNA, 32 nt, Human
uuccugagggccagaggggagccccaggaccc

SEQ ID NO: 536748 - RNA, 32 nt, Human
uuccugagguucccuucaccccucucucuugc

SEQ ID NO: 536749 - RNA, 32 nt, Human
uuccugaguagcuaggacuacaagcaugugcc

SEQ ID NO: 536750 - RNA, 32 nt, Human
uuccugaguagcugggacuacaggcacccgcc

SEQ ID NO: 536751 - RNA, 32 nt, Human
uuccugaguagcugggaggacaggcaugcgcc

SEQ ID NO: 536752 - RNA, 32 nt, Human
uuccugaguagcugggauuacaggcagccacc

SEQ ID NO: 536753 - RNA, 32 nt, Human
uuccugaguagcugggauuacaggcgcccgcc

SEQ ID NO: 536754 - RNA, 32 nt, Human
uuccugaguagcugggauuacaggugcgcacc

SEQ ID NO: 536755 - RNA, 32 nt, Human
uuccugaguaggugggauuacaagcaugcacc

SEQ ID NO: 536756 - RNA, 32 nt, Human
uuccugaguaguugggaauacaggcaugcgcu

SEQ ID NO: 536757 - RNA, 32 nt, Human
uuccugagucaccccucuguccagccagcucc

SEQ ID NO: 536758 - RNA, 32 nt, Human
uuccugauccacccucuccucccaccucccac

SEQ ID NO: 536759 - RNA, 32 nt, Human
uuccugaucccccaccugucugaaaaguaccu

SEQ ID NO: 536760 - RNA, 32 nt, Human
uuccugaugaucuuuaaaauguggucacuaaa

SEQ ID NO: 536761 - RNA, 32 nt, Human
uuccugaugcugugugggucucuggcuccccc

SEQ ID NO: 536762 - RNA, 32 nt, Human
uuccugauucauucuucuugggcuuugcuagc

SEQ ID NO: 536763 - RNA, 23 nt, Human
uuccugauuccaccuaccuccua

SEQ ID NO: 536764 - RNA, 27 nt, Human
uuccugauucugagacuuugggacuug

SEQ ID NO: 536765 - RNA, 27 nt, Human
uuccugauucugaggcuuugggacuug

SEQ ID NO: 536766 - RNA, 32 nt, Human
uuccugauuguggcugagagagaugauuacug

SEQ ID NO: 536767 - RNA, 32 nt, Human
uuccugauuugaaaguuuguuuuuaaaaguuu

SEQ ID NO: 536768 - RNA, 21 nt, Human
uuccugcaaaguauuauugua

SEQ ID NO: 536769 - RNA, 23 nt, Human
uuccugcacggaccugggacuug

SEQ ID NO: 536770 - RNA, 32 nt, Human
uuccugcagacaccagcucuccuuccugccuu

SEQ ID NO: 536771 - RNA, 32 nt, Human
uuccugcagaggaucaagacagcacguggacc

SEQ ID NO: 536772 - RNA, 32 nt, Human
uuccugcagaggccucuuucugccuccauggc

SEQ ID NO: 536773 - RNA, 32 nt, Human
uuccugcagcagcugcugccacugcucagcgc

SEQ ID NO: 536774 - RNA, 32 nt, Human
uuccugcagcaugaaggagagcucugcuccca

SEQ ID NO: 536775 - RNA, 32 nt, Human
uuccugcagccuggugcucugcccugcacguc

SEQ ID NO: 536776 - RNA, 32 nt, Human
uuccugcaggagugcucaugagcccagaaugu

SEQ ID NO: 536777 - RNA, 32 nt, Human
uuccugcaggcaggaacaaacagggcugccuu

SEQ ID NO: 536778 - RNA, 32 nt, Human
uuccugcaggccaggccagcugccuccgcgug

SEQ ID NO: 536779 - RNA, 32 nt, Human
uuccugcagggaagcggcagcacacggagacc

SEQ ID NO: 536780 - RNA, 32 nt, Human
uuccugcagggagggaggagagaagggcggca

SEQ ID NO: 536781 - RNA, 32 nt, Human
uuccugcagguguuccaccugccuucggagcc

SEQ ID NO: 536782 - RNA, 32 nt, Human
uuccugcagucagaggauggcagcgggaaggg

SEQ ID NO: 536783 - RNA, 32 nt, Human
uuccugcaguuccagacaccucccacaauaaa

SEQ ID NO: 536784 - RNA, 32 nt, Human
uuccugcaucuucucacccccucaaccaggaa

SEQ ID NO: 536785 - RNA, 32 nt, Human
uuccugcauucuagucccugcugugcugcagg

SEQ ID NO: 536786 - RNA, 32 nt, Human
uuccugcauucugucuguccuuuuccuccuug

SEQ ID NO: 536787 - RNA, 32 nt, Human
uuccugcauuucucccucccuccuucccucgu

SEQ ID NO: 536788 - RNA, 32 nt, Human
uuccugcauuugugaagaauccuucaugacuu

SEQ ID NO: 536789 - RNA, 32 nt, Human
uuccugccaagccaccuuccagugagcucugg

SEQ ID NO: 536790 - RNA, 32 nt, Human
uuccugccaagccgagggcgacggagaucccc

SEQ ID NO: 536791 - RNA, 32 nt, Human
uuccugccagcaggaagccucugccugugcuc

SEQ ID NO: 536792 - RNA, 32 nt, Human
uuccugccagccugugcuugcggcagggagcc

SEQ ID NO: 536793 - RNA, 32 nt, Human
uuccugccaucuacaagaggagaggaccuggc

SEQ ID NO: 536794 - RNA, 32 nt, Human
uuccugcccaccuaaacccucguuuuaguaau

SEQ ID NO: 536795 - RNA, 32 nt, Human
uuccugcccagccugccaccaccgggccaugc

SEQ ID NO: 536796 - RNA, 32 nt, Human
uuccugcccaggccucucccaccaccaccuuc

SEQ ID NO: 536797 - RNA, 32 nt, Human
uuccugcccuggacggugucucagaacaugaa

SEQ ID NO: 536798 - RNA, 32 nt, Human
uuccugcccuggaugggaugugaguggggccc

SEQ ID NO: 536799 - RNA, 32 nt, Human
uuccugcccuucuccuuccucugcucccuugg

SEQ ID NO: 536800 - RNA, 31 nt, Human
uuccugcccuucugccugccugugucugcug

SEQ ID NO: 536801 - RNA, 32 nt, Human
uuccugcccuuuccuuccuuccuuuucucucu

SEQ ID NO: 536802 - RNA, 32 nt, Human
uuccugcccuuugcccagcccugggccuccaa

SEQ ID NO: 536803 - RNA, 32 nt, Human
uuccugccgggaggaaccucaguuggguaagg

SEQ ID NO: 536804 - RNA, 32 nt, Human
uuccugccguccuuuucccuuuaccauguccc

SEQ ID NO: 536805 - RNA, 32 nt, Human
uuccugccgugacuuucuccuccuggacacug

SEQ ID NO: 536806 - RNA, 32 nt, Human
uuccugccucagccucaugaauagcugggauu

SEQ ID NO: 536807 - RNA, 15 nt, Human
uuccugccucaggua

SEQ ID NO: 536808 - RNA, 32 nt, Human
uuccugccuccacccucuuucucgccgcgaag

SEQ ID NO: 536809 - RNA, 32 nt, Human
uuccugccuccaugccacuccagacugcaccg

SEQ ID NO: 536810 - RNA, 32 nt, Human
uuccugccuccggcucuugccucccagugcca

SEQ ID NO: 536811 - RNA, 22 nt, Human
uuccugccuccugccccacuca

SEQ ID NO: 536812 - RNA, 32 nt, Human
uuccugccuggaacucaucugugaacugggac

SEQ ID NO: 536813 - RNA, 32 nt, Human
uuccugccuggauuucuguucuugcaguugcc

SEQ ID NO: 536814 - RNA, 32 nt, Human
uuccugccuuagccuuagccuccugaguagcu

SEQ ID NO: 536815 - RNA, 32 nt, Human
uuccugccuuuugcaaucaugauaccuggcaa

SEQ ID NO: 536816 - RNA, 32 nt, Human
uuccugcgcuugcuuaguguugacauuugaau

SEQ ID NO: 536817 - RNA, 32 nt, Human
uuccugcggcaccaccucccuuuuuauauugc

SEQ ID NO: 536818 - RNA, 32 nt, Human
uuccugcgugccgcagcaaagcaggaauccaa

SEQ ID NO: 536819 - RNA, 32 nt, Human
uuccugcgugcucucccuuugaccugcuuggc

SEQ ID NO: 536820 - RNA, 32 nt, Human
uuccugcguuucuuccuccugcccugggucaa

SEQ ID NO: 536821 - RNA, 22 nt, Human
uuccugcuagcuucuuuuugca

SEQ ID NO: 536822 - RNA, 32 nt, Human
uuccugcucaaaaaccagcaaaauuaguguuu

SEQ ID NO: 536823 - RNA, 32 nt, Human
uuccugcucagcccuguuugcgcagauuaauc

SEQ ID NO: 536824 - RNA, 32 nt, Human
uuccugcuccaucccaccuggguuguaacuca

SEQ ID NO: 536825 - RNA, 32 nt, Human
uuccugcuccuccaccuccuccucuccuuguc

SEQ ID NO: 536826 - RNA, 32 nt, Human
uuccugcuccucccgcccuccccaccaccauc

SEQ ID NO: 536827 - RNA, 32 nt, Human
uuccugcucugcccuuuacaagcugugugacc

SEQ ID NO: 536828 - RNA, 32 nt, Human
uuccugcucuguucugggguccaaaccuuggu

SEQ ID NO: 536829 - RNA, 32 nt, Human
uuccugcucuucccucauuaaauugcuuuuaa

SEQ ID NO: 536830 - RNA, 32 nt, Human
uuccugcugcuuccagcuccaucccuacagac

SEQ ID NO: 536831 - RNA, 32 nt, Human
uuccugcugggguccugguuccucaggagaga

SEQ ID NO: 536832 - RNA, 32 nt, Human
uuccugcuggguggaugcagugguccaggacu

SEQ ID NO: 536833 - RNA, 32 nt, Human
uuccugcuguaucacaggaagugauuugcauu

SEQ ID NO: 536834 - RNA, 32 nt, Human
uuccugcugucccucagccuccaggcuucagu

SEQ ID NO: 536835 - RNA, 32 nt, Human
uuccugcuguuaauuguuagacugguugauga

SEQ ID NO: 536836 - RNA, 32 nt, Human
uuccugcuuaucaccugaacugugccaguauc

SEQ ID NO: 536837 - RNA, 32 nt, Human
uuccugcuuccacguccugacccccuggcccu

SEQ ID NO: 536838 - RNA, 32 nt, Human
uuccugcuuccucuauuuguuugccccaggaa

SEQ ID NO: 536839 - RNA, 32 nt, Human
uuccugcuucuggucuucuccugggcuccacu

SEQ ID NO: 536840 - RNA, 32 nt, Human
uuccugcuugaccacucgcacauggcucuagg

SEQ ID NO: 536841 - RNA, 32 nt, Human
uuccugcuugccaaggcagaggccugggcugg

SEQ ID NO: 536842 - RNA, 32 nt, Human
uuccugcuuguccuccccaaccgccuggccuu

SEQ ID NO: 536843 - RNA, 32 nt, Human
uuccuggaaagcuucauguugaaagaaccuau

SEQ ID NO: 536844 - RNA, 32 nt, Human
uuccuggaaaggcuccuuugggguucagaauc

SEQ ID NO: 536845 - RNA, 32 nt, Human
uuccuggaaccaggaauucauucucaguguag

SEQ ID NO: 536846 - RNA, 32 nt, Human
uuccuggaagaaaaggagaaaagggagaugag

SEQ ID NO: 536847 - RNA, 32 nt, Human
uuccuggaagcaggagaaagaugaggacuuug

SEQ ID NO: 536848 - RNA, 22 nt, Human
uuccuggaagccugcaguuggg

SEQ ID NO: 536849 - RNA, 23 nt, Human
uuccuggacacaggaaagacggg

SEQ ID NO: 536850 - RNA, 24 nt, Human
uuccuggacacgccucugagccgg

SEQ ID NO: 536851 - RNA, 32 nt, Human
uuccuggacagaaacauauccccaaacaccuc

SEQ ID NO: 536852 - RNA, 32 nt, Human
uuccuggacagugagagcagggcugggcgccu

SEQ ID NO: 536853 - RNA, 32 nt, Human
uuccuggacagugagagcagggcuuggcgccu

SEQ ID NO: 536854 - RNA, 22 nt, Human
uuccuggaccgggcagcacggg

SEQ ID NO: 536855 - RNA, 32 nt, Human
uuccuggacggggccagcggaggcagagccgg

SEQ ID NO: 536856 - RNA, 32 nt, Human
uuccuggacuauucaguagccacucagaugcc

SEQ ID NO: 536857 - RNA, 32 nt, Human
uuccuggacuauucaguagccacucagaugcu

SEQ ID NO: 536858 - RNA, 32 nt, Human
uuccuggacuccucaccuccaggaugagcacu

SEQ ID NO: 536859 - RNA, 23 nt, Human
uuccuggagaaagcagcugcaga

SEQ ID NO: 536860 - RNA, 32 nt, Human
uuccuggagcacugucugggaguuucaggagc

SEQ ID NO: 536861 - RNA, 32 nt, Human
uuccuggagcaucugcccuuugcuccuagcag

SEQ ID NO: 536862 - RNA, 32 nt, Human
uuccuggagcccagaggagggcagcagaaggg

SEQ ID NO: 536863 - RNA, 32 nt, Human
uuccuggagcucccagccagagcugagcuuag

SEQ ID NO: 536864 - RNA, 32 nt, Human
uuccuggagcuucugccgccuccuguggaaga

SEQ ID NO: 536865 - RNA, 32 nt, Human
uuccuggaggaauccgagaagagcagagcgga

SEQ ID NO: 536866 - RNA, 23 nt, Human
uuccuggaggacagcagcaugga

SEQ ID NO: 536867 - RNA, 32 nt, Human
uuccuggaggagguggagcugcagcugggacu

SEQ ID NO: 536868 - RNA, 23 nt, Human
uuccuggaggcgaugcagccagg

SEQ ID NO: 536869 - RNA, 32 nt, Human
uuccuggagggauggccagggaaggagaaaac

SEQ ID NO: 536870 - RNA, 32 nt, Human
uuccuggagggcccugggauggacucagagau

SEQ ID NO: 536871 - RNA, 32 nt, Human
uuccuggagguuugcagugaggugaggagagu

SEQ ID NO: 536872 - RNA, 32 nt, Human
uuccuggauauggacaagaacucaggacccaa

SEQ ID NO: 536873 - RNA, 32 nt, Human
uuccuggaucaauauucaaagacuggucauaa

SEQ ID NO: 536874 - RNA, 32 nt, Human
uuccuggaugagaaggaagucugggcugggca

SEQ ID NO: 536875 - RNA, 22 nt, Human
uuccuggauuuguaaauuguaa

SEQ ID NO: 536876 - RNA, 32 nt, Human
uuccuggcaaaguucugcucccugaagcagga

SEQ ID NO: 536877 - RNA, 32 nt, Human
uuccuggcaggcuucaagaacagcugcacaug

SEQ ID NO: 536878 - RNA, 32 nt, Human
uuccuggccacugauuucugcauggguagacc

SEQ ID NO: 536879 - RNA, 32 nt, Human
uuccuggccaguuucacaaucuagcucgacag

SEQ ID NO: 536880 - RNA, 32 nt, Human
uuccuggccauggagaggagaucuggacccga

SEQ ID NO: 536881 - RNA, 32 nt, Human
uuccuggccccagggcccuaauaaaccugcuu

SEQ ID NO: 536882 - RNA, 32 nt, Human
uuccuggcccugcucaguugccucuggaaguc

SEQ ID NO: 536883 - RNA, 32 nt, Human
uuccuggccuccacugccccaggacugaagug

SEQ ID NO: 536884 - RNA, 32 nt, Human
uuccuggccucuccaccaacuguacuucccaa

SEQ ID NO: 536885 - RNA, 32 nt, Human
uuccuggccugcccuccuccuccaggcagccu

SEQ ID NO: 536886 - RNA, 22 nt, Human
uuccuggcggcggcggcgcggg

SEQ ID NO: 536887 - RNA, 32 nt, Human
uuccuggcguaacuagaggagucccagugcag

SEQ ID NO: 536888 - RNA, 32 nt, Human
uuccuggcuaagcaggggcugacaggguggca

SEQ ID NO: 536889 - RNA, 32 nt, Human
uuccuggcucuccugcccacaggaugaacauu

SEQ ID NO: 536890 - RNA, 21 nt, Human
uuccuggcugagaugaugcuu

SEQ ID NO: 536891 - RNA, 32 nt, Human
uuccuggcugggugaccucaaccuaucacccu

SEQ ID NO: 536892 - RNA, 22 nt, Human
uuccuggcugugggaaucuuua

SEQ ID NO: 536893 - RNA, 26 nt, Human
uuccuggcuguucguguugggacuua

SEQ ID NO: 536894 - RNA, 32 nt, Human
uuccugggaaccuggauauugagcucuuacuu

SEQ ID NO: 536895 - RNA, 32 nt, Human
uuccugggagaaaccucccugggagaccaugg

SEQ ID NO: 536896 - RNA, 32 nt, Human
uuccugggaggcgggcgcggcaggacugggag

SEQ ID NO: 536897 - RNA, 24 nt, Human
uuccugggagucacugcagccaga

SEQ ID NO: 536898 - RNA, 32 nt, Human
uuccugggcaaagaagaaacggaggggaugaa

SEQ ID NO: 536899 - RNA, 32 nt, Human
uuccugggcagagggcagagugaggccaccug

SEQ ID NO: 536900 - RNA, 32 nt, Human
uuccugggccccaccaagacccaccaaaacca

SEQ ID NO: 536901 - RNA, 32 nt, Human
uuccugggcccuucccugggccucaggauccc

SEQ ID NO: 536902 - RNA, 24 nt, Human
uuccugggcuagccugcggucagg

SEQ ID NO: 536903 - RNA, 23 nt, Human
uuccugggcuaugcugccacaga

SEQ ID NO: 536904 - RNA, 32 nt, Human
uuccugggcucccagcccuaaaacucacugcc

SEQ ID NO: 536905 - RNA, 32 nt, Human
uuccugggcuccccuucucucuaccuucuccc

SEQ ID NO: 536906 - RNA, 32 nt, Human
uuccugggcucuauauuugauuuuggaaggca

SEQ ID NO: 536907 - RNA, 32 nt, Human
uuccugggcugaggacauggggauccaaggcc

SEQ ID NO: 536908 - RNA, 32 nt, Human
uuccugggcugcaggggagcaggaaaucuggg

SEQ ID NO: 536909 - RNA, 32 nt, Human
uuccuggggaauaaaaacuaccauuggaccua

SEQ ID NO: 536910 - RNA, 32 nt, Human
uuccuggggaauucacuucucuuccucccuca

SEQ ID NO: 536911 - RNA, 32 nt, Human
uuccuggggcaagagcaccaggcuccagggca

SEQ ID NO: 536912 - RNA, 32 nt, Human
uuccuggggcaggcggaaacaggcucacagau

SEQ ID NO: 536913 - RNA, 21 nt, Human
uuccuggggcgcgggcgcggg

SEQ ID NO: 536914 - RNA, 23 nt, Human
uuccuggggcuccggggcgcgga

SEQ ID NO: 536915 - RNA, 32 nt, Human
uuccuggggcugcagccagccugggacuuuug

SEQ ID NO: 536916 - RNA, 32 nt, Human
uuccugggggaucagacugugaagcaggaaga

SEQ ID NO: 536917 - RNA, 21 nt, Human
uuccugggggcagcagccggg

SEQ ID NO: 536918 - RNA, 32 nt, Human
uuccugggggccgaggaaguggggccacucug

SEQ ID NO: 536919 - RNA, 32 nt, Human
uuccugggggugacugaaugcccagccaggga

SEQ ID NO: 536920 - RNA, 32 nt, Human
uuccugggguacaagggcaggccagguaaggc

SEQ ID NO: 536921 - RNA, 32 nt, Human
uuccuggggugcuugugcccacuguguggaca

SEQ ID NO: 536922 - RNA, 32 nt, Human
uuccugggguggacucagaugggugggacaca

SEQ ID NO: 536923 - RNA, 32 nt, Human
uuccuggguagaagggaaaagacuggaaaaau

SEQ ID NO: 536924 - RNA, 32 nt, Human
uuccugggugcaccccucccccucucccgugc

SEQ ID NO: 536925 - RNA, 32 nt, Human
uuccugggugucuugcuugauuuucauaauag

SEQ ID NO: 536926 - RNA, 32 nt, Human
uuccuggguuccguggauucucuccuucuccu

SEQ ID NO: 536927 - RNA, 19 nt, Human
uuccuggguucuggcuccu

SEQ ID NO: 536928 - RNA, 32 nt, Human
uuccuggguugaauggggaccuggagaacuuu

SEQ ID NO: 536929 - RNA, 31 nt, Human
uuccugguaaugucucuccgaggugaaggcu

SEQ ID NO: 536930 - RNA, 32 nt, Human
uuccugguagccuccuuuccuccccuucugcc

SEQ ID NO: 536931 - RNA, 18 nt, Human
uuccugguagggaacugc

SEQ ID NO: 536932 - RNA, 21 nt, Human
uuccugguaguuugcguguaa

SEQ ID NO: 536933 - RNA, 32 nt, Human
uuccuggucccaaagccugguuggugaugguu

SEQ ID NO: 536934 - RNA, 32 nt, Human
uuccuggucccaggaccucugguggagggcca

SEQ ID NO: 536935 - RNA, 32 nt, Human
uuccugguccccaacguuuaucuagcuuguuu

SEQ ID NO: 536936 - RNA, 32 nt, Human
uuccuggucccuuuuugaggcaguagcaggua

SEQ ID NO: 536937 - RNA, 32 nt, Human
uuccuggucguuucucaaccugaggugcauag

SEQ ID NO: 536938 - RNA, 32 nt, Human
uuccuggucuucucccccagggucuugcucug

SEQ ID NO: 536939 - RNA, 32 nt, Human
uuccuggugagguugcguggguggauuaauuu

SEQ ID NO: 536940 - RNA, 19 nt, Human
uuccuggugcaguauuuca

SEQ ID NO: 536941 - RNA, 24 nt, Human
uuccugguggcuuuguuuacacug

SEQ ID NO: 536942 - RNA, 32 nt, Human
uuccuggugggagcugaagcacugggcuucca

SEQ ID NO: 536943 - RNA, 32 nt, Human
uuccugguguuuggauggucagcugggagugu

SEQ ID NO: 536944 - RNA, 32 nt, Human
uuccugguucaagugauucuccugccucagcc

SEQ ID NO: 536945 - RNA, 22 nt, Human
uuccugguuccagaaagggcug

SEQ ID NO: 536946 - RNA, 32 nt, Human
uuccugguugcaaccucucuuccucugggacu

SEQ ID NO: 536947 - RNA, 32 nt, Human
uuccugguugcccuuuuggaaugugauccugu

SEQ ID NO: 536948 - RNA, 32 nt, Human
uuccugguuguauguggccuguuuacaugaug

SEQ ID NO: 536949 - RNA, 32 nt, Human
uuccugguuuaugacuuucggcuuuguggaau

SEQ ID NO: 536950 - RNA, 21 nt, Human
uuccuguaagcagauguuuua

SEQ ID NO: 536951 - RNA, 32 nt, Human
uuccuguacaaacagugcacacacaugaacau

SEQ ID NO: 536952 - RNA, 32 nt, Human
uuccuguacagccuguggaacugugacuuuuc

SEQ ID NO: 536953 - RNA, 32 nt, Human
uuccuguaucuauuuuccucuauuuccuauca

SEQ ID NO: 536954 - RNA, 32 nt, Human
uuccuguauucacccguccagaccuuguucac

SEQ ID NO: 536955 - RNA, 32 nt, Human
uuccuguauuuuuaguagagacaggguuucac

SEQ ID NO: 536956 - RNA, 32 nt, Human
uuccugucacccaggcuggaguacaguggcgu

SEQ ID NO: 536957 - RNA, 32 nt, Human
uuccugucaccugcugagcuuucccaguguca

SEQ ID NO: 536958 - RNA, 32 nt, Human
uuccuguccccauguuucucugaggccuggca

SEQ ID NO: 536959 - RNA, 32 nt, Human
uuccugucccucucucccuuuguugggcaaag

SEQ ID NO: 536960 - RNA, 31 nt, Human
uuccugucccucucugagccuucacuuccuc

SEQ ID NO: 536961 - RNA, 32 nt, Human
uuccuguccuucuccccucccagcuccuggcg

SEQ ID NO: 536962 - RNA, 32 nt, Human
uuccugucgagugggcugggccacgcugacca

SEQ ID NO: 536963 - RNA, 32 nt, Human
uuccugucuauauaaaacaaguuucauauucg

SEQ ID NO: 536964 - RNA, 32 nt, Human
uuccugucucucuuccccuccucucucucuuc

SEQ ID NO: 536965 - RNA, 23 nt, Human
uuccugucugcgcugcgggcagg

SEQ ID NO: 536966 - RNA, 32 nt, Human
uuccugucuguauguggaauggaaggaccgug

SEQ ID NO: 536967 - RNA, 32 nt, Human
uuccugucuuauccuccaccgucuuucuuuua

SEQ ID NO: 536968 - RNA, 32 nt, Human
uuccugugaagcggucucuucuccccaggccc

SEQ ID NO: 536969 - RNA, 32 nt, Human
uuccugugaagugacagguguggacccugagg

SEQ ID NO: 536970 - RNA, 31 nt, Human
uuccugugacuucuuacuuugaugaagugca

SEQ ID NO: 536971 - RNA, 32 nt, Human
uuccugugaucucgcccugccuccacuugccu

SEQ ID NO: 536972 - RNA, 32 nt, Human
uuccugugcauuccaaguguugccugcaugcc

SEQ ID NO: 536973 - RNA, 32 nt, Human
uuccugugcccugugguaguuggaaacaaauc

SEQ ID NO: 536974 - RNA, 23 nt, Human
uuccugugccuaccuggggcuug

SEQ ID NO: 536975 - RNA, 32 nt, Human
uuccugugccugcgcuucuucucccccgccau

SEQ ID NO: 536976 - RNA, 32 nt, Human
uuccugugccuuauuguuucucccucuucucu

SEQ ID NO: 536977 - RNA, 23 nt, Human
uuccugugcuuuugugauuccaa

SEQ ID NO: 536978 - RNA, 32 nt, Human
uuccuguggaaggcagaggcagugagggaggu

SEQ ID NO: 536979 - RNA, 32 nt, Human
uuccuguggagauaagcccugccccucguucc

SEQ ID NO: 536980 - RNA, 32 nt, Human
uuccuguggcugggagcagcagcuccugaagg

SEQ ID NO: 536981 - RNA, 32 nt, Human
uuccugugggcaaccacaccacugccuggcgc

SEQ ID NO: 536982 - RNA, 32 nt, Human
uuccugugggcagaagggcugaggaagauggc

SEQ ID NO: 536983 - RNA, 32 nt, Human
uuccugugggcccugcugaacugugguuuggg

SEQ ID NO: 536984 - RNA, 32 nt, Human
uuccuguguaguuuacacccagagcagauacu

SEQ ID NO: 536985 - RNA, 32 nt, Human
uuccugugugagccaccacacccagccugggu

SEQ ID NO: 536986 - RNA, 32 nt, Human
uuccuguguguagacuguggccuggccuucgg

SEQ ID NO: 536987 - RNA, 32 nt, Human
uuccuguguguuucaggcauucacagauaaac

SEQ ID NO: 536988 - RNA, 32 nt, Human
uuccuguuaagccuguggaacugugaguccaa

SEQ ID NO: 536989 - RNA, 32 nt, Human
uuccuguucacagauaaagaaagaaagaaaua

SEQ ID NO: 536990 - RNA, 32 nt, Human
uuccuguucagcucccugugcgacccuccagg

SEQ ID NO: 536991 - RNA, 32 nt, Human
uuccuguucauuuuaaggaaaccuacuaaauc

SEQ ID NO: 536992 - RNA, 32 nt, Human
uuccuguuccccuuuuucaucuccuguauccu

SEQ ID NO: 536993 - RNA, 32 nt, Human
uuccuguucccuccccuccccuuccuguccuu

SEQ ID NO: 536994 - RNA, 32 nt, Human
uuccuguugcacccagugaucucuccggccuc

SEQ ID NO: 536995 - RNA, 32 nt, Human
uuccuguuggccccagcugcacucgcagggcc

SEQ ID NO: 536996 - RNA, 32 nt, Human
uuccuguuguacucugaauuucucucccuacc

SEQ ID NO: 536997 - RNA, 20 nt, Human
uuccuguuuccuguacaaug

SEQ ID NO: 536998 - RNA, 32 nt, Human
uuccuguuuggauuagaccauaguugacccau

SEQ ID NO: 536999 - RNA, 32 nt, Human
uuccuuaaaagauacgugccggggccaggugu

SEQ ID NO: 537000 - RNA, 24 nt, Human
uuccuuaaauaaaguaaaaaugac

SEQ ID NO: 537001 - RNA, 32 nt, Human
uuccuuaacagagggcaucauggaugcugggu

SEQ ID NO: 537002 - RNA, 32 nt, Human
uuccuuaacucucccuuccuggaaccgaaaug

SEQ ID NO: 537003 - RNA, 32 nt, Human
uuccuuaagcagcuggcucugggaaggucuca

SEQ ID NO: 537004 - RNA, 32 nt, Human
uuccuuaagccuugauuuccugaagcucucuc

SEQ ID NO: 537005 - RNA, 32 nt, Human
uuccuuacuucccagccccaccuucuaguucu

SEQ ID NO: 537006 - RNA, 32 nt, Human
uuccuuagacuggcggcuaccccgccacuggc

SEQ ID NO: 537007 - RNA, 32 nt, Human
uuccuuagagaccacuucauuaucuaaaagau

SEQ ID NO: 537008 - RNA, 32 nt, Human
uuccuuagagagagauggauuuuuguuggcaa

SEQ ID NO: 537009 - RNA, 32 nt, Human
uuccuuagagccugaguggugugaggugacag

SEQ ID NO: 537010 - RNA, 32 nt, Human
uuccuuagccuccugaguagcugggauuacag

SEQ ID NO: 537011 - RNA, 32 nt, Human
uuccuuagcuggaagccagggcuggaagcuac

SEQ ID NO: 537012 - RNA, 32 nt, Human
uuccuuagggcagugccucuagcuguguccuc

SEQ ID NO: 537013 - RNA, 32 nt, Human
uuccuuagucaggguucccugaaggaaugagg

SEQ ID NO: 537014 - RNA, 32 nt, Human
uuccuuagugagcuccacauuacuugauggua

SEQ ID NO: 537015 - RNA, 32 nt, Human
uuccuuaguucagagccugcaaaugaucacug

SEQ ID NO: 537016 - RNA, 32 nt, Human
uuccuuauaucuucuuguuagacaucuucugu

SEQ ID NO: 537017 - RNA, 32 nt, Human
uuccuuaucuugaaucuugcucugucacccag

SEQ ID NO: 537018 - RNA, 32 nt, Human
uuccuuaugguccugcuccuucugcugucaga

SEQ ID NO: 537019 - RNA, 32 nt, Human
uuccuuauucaacaugagaaagcucaugggca

SEQ ID NO: 537020 - RNA, 32 nt, Human
uuccuuauuuccuuuaguuuccuuccuuagcc

SEQ ID NO: 537021 - RNA, 32 nt, Human
uuccuucaaacaauggggugcuuccaaaccgg

SEQ ID NO: 537022 - RNA, 32 nt, Human
uuccuucaacguccacauuccaggugaccaca

SEQ ID NO: 537023 - RNA, 32 nt, Human
uuccuucaacuggcuacugagucaugauccuu

SEQ ID NO: 537024 - RNA, 32 nt, Human
uuccuucacaccaauucuccuccugagacgga

SEQ ID NO: 537025 - RNA, 31 nt, Human
uuccuucacagcuaugaauaagcuuucaggu

SEQ ID NO: 537026 - RNA, 32 nt, Human
uuccuucacagcuuugcuuuucugccucuucu

SEQ ID NO: 537027 - RNA, 32 nt, Human
uuccuucacccaccaucccccuaaccucggca

SEQ ID NO: 537028 - RNA, 32 nt, Human
uuccuucacuucucagugcugccugugaugag

SEQ ID NO: 537029 - RNA, 32 nt, Human
uuccuucagcuguguaucccagacuguuaaua

SEQ ID NO: 537030 - RNA, 32 nt, Human
uuccuucaggaguugaucucuaaugcuucuga

SEQ ID NO: 537031 - RNA, 32 nt, Human
uuccuucaggccuggcggcggcuuccaagcua

SEQ ID NO: 537032 - RNA, 32 nt, Human
uuccuucagugagcagaaucacuguggucagu

SEQ ID NO: 537033 - RNA, 32 nt, Human
uuccuucauaaaacauguaacacugaucuuca

SEQ ID NO: 537034 - RNA, 32 nt, Human
uuccuucauccucuuguuccuaaggaaacaaa

SEQ ID NO: 537035 - RNA, 28 nt, Human
uuccuucaugaacaucccccucccaaca

SEQ ID NO: 537036 - RNA, 32 nt, Human
uuccuucauggagccugcuucauguggaggaa

SEQ ID NO: 537037 - RNA, 32 nt, Human
uuccuucauggaggcucuggggaagaaucugc

SEQ ID NO: 537038 - RNA, 32 nt, Human
uuccuucauucaacccaccugcgucucauacu

SEQ ID NO: 537039 - RNA, 32 nt, Human
uuccuuccacuuacccacuaccucucacgcug

SEQ ID NO: 537040 - RNA, 32 nt, Human
uuccuuccagagagcacagagugggagguagg

SEQ ID NO: 537041 - RNA, 32 nt, Human
uuccuuccaguauucuauuuaaguaccuacua

SEQ ID NO: 537042 - RNA, 31 nt, Human
uuccuuccagugagagaaaaauagaauggua

SEQ ID NO: 537043 - RNA, 32 nt, Human
uuccuuccaucuuccucucuuagaucagcugg

SEQ ID NO: 537044 - RNA, 32 nt, Human
uuccuucccacugccaaaggccuguguugaga

SEQ ID NO: 537045 - RNA, 32 nt, Human
uuccuucccagcacucccagccugggauaagc

SEQ ID NO: 537046 - RNA, 32 nt, Human
uuccuucccauggauaggaagggacucugugu

SEQ ID NO: 537047 - RNA, 19 nt, Human
uuccuuccccaccccugcc

SEQ ID NO: 537048 - RNA, 32 nt, Human
uuccuucccccuggccugagggugggugggga

SEQ ID NO: 537049 - RNA, 32 nt, Human
uuccuuccccuccacccucccccacaaaauuc

SEQ ID NO: 537050 - RNA, 32 nt, Human
uuccuuccccugcaccuggccugggccacacc

SEQ ID NO: 537051 - RNA, 32 nt, Human
uuccuucccuggaguguagaccuguguguggg

SEQ ID NO: 537052 - RNA, 32 nt, Human
uuccuucccuggcacacugcauaacaccaguc

SEQ ID NO: 537053 - RNA, 32 nt, Human
uuccuucccuuucccuuucuuccugacuagcc

SEQ ID NO: 537054 - RNA, 32 nt, Human
uuccuucccuuuccucuugcuguuuccuuccu

SEQ ID NO: 537055 - RNA, 32 nt, Human
uuccuucccuuuucuuuucuuuucuuucuacu

SEQ ID NO: 537056 - RNA, 32 nt, Human
uuccuuccguccucaauuucuaccuccauaga

SEQ ID NO: 537057 - RNA, 32 nt, Human
uuccuuccuagagcuucaguguguuucuugug

SEQ ID NO: 537058 - RNA, 32 nt, Human
uuccuuccuauacauuguuuacacuucaacua

SEQ ID NO: 537059 - RNA, 32 nt, Human
uuccuuccucaccuggcucugccucccccgug

SEQ ID NO: 537060 - RNA, 32 nt, Human
uuccuuccuccagggcuuggggcuccugccca

SEQ ID NO: 537061 - RNA, 32 nt, Human
uuccuuccuccccuggcucccgcccucccucu

SEQ ID NO: 537062 - RNA, 32 nt, Human
uuccuuccucccuuccuucccuucccucccuu

SEQ ID NO: 537063 - RNA, 32 nt, Human
uuccuuccucuguccggagaggcacagguguc

SEQ ID NO: 537064 - RNA, 32 nt, Human
uuccuuccucuuuaucccuccuguuuuacuuu

SEQ ID NO: 537065 - RNA, 32 nt, Human
uuccuuccugagaacagucuugcucuugccau

SEQ ID NO: 537066 - RNA, 32 nt, Human
uuccuuccugauguggaauuguacauuuaaag

SEQ ID NO: 537067 - RNA, 32 nt, Human
uuccuuccugcgcuucuuccccaaagcucuua

SEQ ID NO: 537068 - RNA, 32 nt, Human
uuccuuccugugucccagagcuucacuggugg

SEQ ID NO: 537069 - RNA, 32 nt, Human
uuccuuccuuccccaacuccccaaacacugug

SEQ ID NO: 537070 - RNA, 32 nt, Human
uuccuuccuucccccuccucccccuccuuucc

SEQ ID NO: 537071 - RNA, 32 nt, Human
uuccuuccuucuuccucucuuagaccagcuuc

SEQ ID NO: 537072 - RNA, 32 nt, Human
uuccuucgccgcucccuccuguccccacucag

SEQ ID NO: 537073 - RNA, 32 nt, Human
uuccuucggucgucccgaauccggguucaucc

SEQ ID NO: 537074 - RNA, 32 nt, Human
uuccuucuaaggguucaucuucuaugcagucu

SEQ ID NO: 537075 - RNA, 32 nt, Human
uuccuucuacccacuuuagguuccuuggcugg

SEQ ID NO: 537076 - RNA, 32 nt, Human
uuccuucuagaaggagcuuccugacuggaacc

SEQ ID NO: 537077 - RNA, 32 nt, Human
uuccuucuagucuauuucagccuagaagaaaa

SEQ ID NO: 537078 - RNA, 32 nt, Human
uuccuucucaugcgccucuccgaaucacaccc

SEQ ID NO: 537079 - RNA, 32 nt, Human
uuccuucuccaaagcugggagucauguugccu

SEQ ID NO: 537080 - RNA, 32 nt, Human
uuccuucuccaaaggcuuggaguuuucuucug

SEQ ID NO: 537081 - RNA, 32 nt, Human
uuccuucuccacucucuccaugcccuggagaa

SEQ ID NO: 537082 - RNA, 32 nt, Human
uuccuucuccauccacacuggucccaaaugcc

SEQ ID NO: 537083 - RNA, 32 nt, Human
uuccuucuccauucccacugcuucacuugccu

SEQ ID NO: 537084 - RNA, 32 nt, Human
uuccuucucccugcaaccucaguccaaggaac

SEQ ID NO: 537085 - RNA, 32 nt, Human
uuccuucuccucaucccuccccaaaacaagaa

SEQ ID NO: 537086 - RNA, 32 nt, Human
uuccuucuccucuuccucuucuucuucuuccu

SEQ ID NO: 537087 - RNA, 32 nt, Human
uuccuucucuccaucauagucugggugccagc

SEQ ID NO: 537088 - RNA, 32 nt, Human
uuccuucucucccuuauccuuguucaagggcc

SEQ ID NO: 537089 - RNA, 32 nt, Human
uuccuucucucccuuucucauucucauuccac

SEQ ID NO: 537090 - RNA, 32 nt, Human
uuccuucugauucugccugaauagcugagagg

SEQ ID NO: 537091 - RNA, 32 nt, Human
uuccuucugcagcccuccuucugggcacuaag

SEQ ID NO: 537092 - RNA, 32 nt, Human
uuccuucugcccacccgcccuucuucccucug

SEQ ID NO: 537093 - RNA, 32 nt, Human
uuccuucugggcugucuccaucugacccuacc

SEQ ID NO: 537094 - RNA, 32 nt, Human
uuccuucuuacugcccuguccucugccuugga

SEQ ID NO: 537095 - RNA, 32 nt, Human
uuccuucuucaaggaucaaauguuuauugggg

SEQ ID NO: 537096 - RNA, 32 nt, Human
uuccuucuucauuuucgugccuggagugccuu

SEQ ID NO: 537097 - RNA, 19 nt, Human
uuccuucuuccuucucccg

SEQ ID NO: 537098 - RNA, 32 nt, Human
uuccuucuucuuuacuuacuggcaucagcaca

SEQ ID NO: 537099 - RNA, 32 nt, Human
uuccuucuuggucagagguagcugcagagggg

SEQ ID NO: 537100 - RNA, 32 nt, Human
uuccuucuuuacaaaaccaucauuucaacaug

SEQ ID NO: 537101 - RNA, 32 nt, Human
uuccuucuuuccccuuuugucuugcccacucc

SEQ ID NO: 537102 - RNA, 32 nt, Human
uuccuucuuuuuagaacccuguauuuaaacaa

SEQ ID NO: 537103 - RNA, 31 nt, Human
uuccuugaaacaugcaugcauuuaaaaauaa

SEQ ID NO: 537104 - RNA, 32 nt, Human
uuccuugaaaggcucaagacuguagcauggug

SEQ ID NO: 537105 - RNA, 32 nt, Human
uuccuugaacccaggagguggagguugcagug

SEQ ID NO: 537106 - RNA, 32 nt, Human
uuccuugagagaaaccgcugucauuaauaaaa

SEQ ID NO: 537107 - RNA, 32 nt, Human
uuccuugagauugucuuggcauggcccagccc

SEQ ID NO: 537108 - RNA, 32 nt, Human
uuccuugagcagaaaagagcacugagagcacu

SEQ ID NO: 537109 - RNA, 32 nt, Human
uuccuugagccacccuucccaccccagcccuu

SEQ ID NO: 537110 - RNA, 32 nt, Human
uuccuugaggcugauagcuagggcuugaccag

SEQ ID NO: 537111 - RNA, 32 nt, Human
uuccuugaggucagaggucaggagcagggcug

SEQ ID NO: 537112 - RNA, 32 nt, Human
uuccuugaggucccuuggggcagcaguuaaag

SEQ ID NO: 537113 - RNA, 32 nt, Human
uuccuugagucagugcuguugaugacgaguug

SEQ ID NO: 537114 - RNA, 32 nt, Human
uuccuugagugugggggauuugggugaaugag

SEQ ID NO: 537115 - RNA, 32 nt, Human
uuccuugaugagcucauggagcuugagaucuu

SEQ ID NO: 537116 - RNA, 32 nt, Human
uuccuugauucaguccuugacaaggaaucucc

SEQ ID NO: 537117 - RNA, 32 nt, Human
uuccuugcaaccacccuuggaccugacucagc

SEQ ID NO: 537118 - RNA, 32 nt, Human
uuccuugcauuuuccuaauaugccuuuacuga

SEQ ID NO: 537119 - RNA, 32 nt, Human
uuccuugccacuggucucaaagcugggcagcc

SEQ ID NO: 537120 - RNA, 32 nt, Human
uuccuugccaggccuguuuccccaccaggaaa

SEQ ID NO: 537121 - RNA, 32 nt, Human
uuccuugcccacuguuucuuccuuucugugcc

SEQ ID NO: 537122 - RNA, 32 nt, Human
uuccuugccuccuucuuuccucccucucucug

SEQ ID NO: 537123 - RNA, 32 nt, Human
uuccuugccugagaucaccuagaaaggaaccc

SEQ ID NO: 537124 - RNA, 32 nt, Human
uuccuugccugggaaucugucccaggaagagc

SEQ ID NO: 537125 - RNA, 32 nt, Human
uuccuugcugucaucuggcuugaguucugagg

SEQ ID NO: 537126 - RNA, 32 nt, Human
uuccuugcuuccuuccuuccucucuuucuguu

SEQ ID NO: 537127 - RNA, 32 nt, Human
uuccuugcuuucucuucuaauggaauaugcgu

SEQ ID NO: 537128 - RNA, 32 nt, Human
uuccuuggaacacauaagaacugugcaguagc

SEQ ID NO: 537129 - RNA, 32 nt, Human
uuccuuggagaagggcccuccugcagcuggac

SEQ ID NO: 537130 - RNA, 32 nt, Human
uuccuuggagacuggcccugcauucaggcagg

SEQ ID NO: 537131 - RNA, 32 nt, Human
uuccuuggagcagccucuucuggcagaaagcc

SEQ ID NO: 537132 - RNA, 32 nt, Human
uuccuuggcaucuccccacugcuccucucuuu

SEQ ID NO: 537133 - RNA, 32 nt, Human
uuccuuggcucaguuguguuuguauuuccuuu

SEQ ID NO: 537134 - RNA, 32 nt, Human
uuccuugggaggcggaauucgucugaaucgcu

SEQ ID NO: 537135 - RNA, 32 nt, Human
uuccuugggaggcugaggcgggagaauugcuu

SEQ ID NO: 537136 - RNA, 32 nt, Human
uuccuuggggacaagggugguuggcagcucca

SEQ ID NO: 537137 - RNA, 32 nt, Human
uuccuuggggcagagggaguuucagacaagac

SEQ ID NO: 537138 - RNA, 32 nt, Human
uuccuuggguguuacaugagccaagcccucac

SEQ ID NO: 537139 - RNA, 32 nt, Human
  misc_feature (9)..(9): n is a, c, g, or u
uuccuuggnagggaaagggaaggguuggggga

SEQ ID NO: 537140 - RNA, 32 nt, Human
uuccuugguauccaacuuaaaucccagaauuu

SEQ ID NO: 537141 - RNA, 32 nt, Human
uuccuugguauggugacagugucucuccaugg

SEQ ID NO: 537142 - RNA, 32 nt, Human
uuccuuggugaggacuccaagaacucacugau

SEQ ID NO: 537143 - RNA, 32 nt, Human
uuccuuggugccacugaccacagcucuuucuu

SEQ ID NO: 537144 - RNA, 32 nt, Human
uuccuugguuccuguggaaugcaucugggaag

SEQ ID NO: 537145 - RNA, 32 nt, Human
uuccuugguuguacagguguacauuuguaaac

SEQ ID NO: 537146 - RNA, 20 nt, Human
uuccuugguuugugacugca

SEQ ID NO: 537147 - RNA, 32 nt, Human
uuccuuguccccuccuccuccuuguccaucuc

SEQ ID NO: 537148 - RNA, 32 nt, Human
uuccuuguccugcuuauucuuuuguucuugaa

SEQ ID NO: 537149 - RNA, 32 nt, Human
uuccuugucugccuccugcugcuucuguaacu

SEQ ID NO: 537150 - RNA, 32 nt, Human
uuccuugucugccuuuacagauguuuccucuu

SEQ ID NO: 537151 - RNA, 20 nt, Human
uuccuugucuggaaaggguu

SEQ ID NO: 537152 - RNA, 32 nt, Human
uuccuugugggauuggaccagcauuccucaag

SEQ ID NO: 537153 - RNA, 32 nt, Human
uuccuugugguccugcuccuucugcugucaga

SEQ ID NO: 537154 - RNA, 32 nt, Human
uuccuuguuucugcucagcccagaugcacaga

SEQ ID NO: 537155 - RNA, 32 nt, Human
uuccuuuaaaaaccuuugucaggcugggcgcg

SEQ ID NO: 537156 - RNA, 32 nt, Human
uuccuuuaacagcaaaaggaaagagagguucu

SEQ ID NO: 537157 - RNA, 32 nt, Human
uuccuuuaaugucuuucuaaguugaagggcag

SEQ ID NO: 537158 - RNA, 32 nt, Human
uuccuuuacugucucuccuuuucugaccauua

SEQ ID NO: 537159 - RNA, 32 nt, Human
uuccuuuauccugaguacugggauuacaggcg

SEQ ID NO: 537160 - RNA, 32 nt, Human
uuccuuucacugcauuuuccaccaacagucau

SEQ ID NO: 537161 - RNA, 32 nt, Human
uuccuuucacuuucacacuucaucucauuccu

SEQ ID NO: 537162 - RNA, 32 nt, Human
uuccuuucauuuccccagccuaggcaagggug

SEQ ID NO: 537163 - RNA, 32 nt, Human
uuccuuuccaacccuuucaucccugugcagcc

SEQ ID NO: 537164 - RNA, 32 nt, Human
uuccuuuccagccucacgcccgugggcugcag

SEQ ID NO: 537165 - RNA, 32 nt, Human
uuccuuuccaggaagggaggcaggagcacccg

SEQ ID NO: 537166 - RNA, 32 nt, Human
uuccuuuccccuucccuucccuucccuuccau

SEQ ID NO: 537167 - RNA, 32 nt, Human
uuccuuucccgcauucagacccugcagacacu

SEQ ID NO: 537168 - RNA, 32 nt, Human
uuccuuucccuuucuuuccuuuuucccugucc

SEQ ID NO: 537169 - RNA, 32 nt, Human
uuccuuuccguguuccccaacaaccucaugcu

SEQ ID NO: 537170 - RNA, 32 nt, Human
uuccuuuccucccucccucugccauccuucau

SEQ ID NO: 537171 - RNA, 32 nt, Human
uuccuuuccucuugaccuucuuuccaucuuuc

SEQ ID NO: 537172 - RNA, 22 nt, Human
uuccuuuccugugaaaagguug

SEQ ID NO: 537173 - RNA, 32 nt, Human
uuccuuuccuuaccuuguuucuucccagaaaa

SEQ ID NO: 537174 - RNA, 32 nt, Human
uuccuuuccuucacuucccuuuuaaccccuag

SEQ ID NO: 537175 - RNA, 32 nt, Human
uuccuuuccuugugguugaaaccacagucagu

SEQ ID NO: 537176 - RNA, 32 nt, Human
uuccuuuccuuuccuuuccucuccugcccauu

SEQ ID NO: 537177 - RNA, 32 nt, Human
uuccuuuccuuuccuuucuuucuuccuuuccu

SEQ ID NO: 537178 - RNA, 32 nt, Human
uuccuuuccuuugaccuaauggagcuagaaau

SEQ ID NO: 537179 - RNA, 32 nt, Human
uuccuuucucaaaucagcaaauucucucugag

SEQ ID NO: 537180 - RNA, 32 nt, Human
uuccuuucucaccuccuccuccacucccugcc

SEQ ID NO: 537181 - RNA, 32 nt, Human
uuccuuucuccuccucucauccuacacacacu

SEQ ID NO: 537182 - RNA, 32 nt, Human
uuccuuucucuccacaccucccaaacccgcug

SEQ ID NO: 537183 - RNA, 32 nt, Human
uuccuuucugcccuuuucccuagagauaaggu

SEQ ID NO: 537184 - RNA, 32 nt, Human
uuccuuucugcugccugaugucucaauggcuu

SEQ ID NO: 537185 - RNA, 32 nt, Human
uuccuuucugcuuuucugaaugcaucaagggu

SEQ ID NO: 537186 - RNA, 32 nt, Human
uuccuuucuucuugugacaaaacaucuuucaa

SEQ ID NO: 537187 - RNA, 32 nt, Human
uuccuuucuugcaaauugcuuuguguguucaa

SEQ ID NO: 537188 - RNA, 32 nt, Human
uuccuuucuuuccuuuuucuugucuuguuucu

SEQ ID NO: 537189 - RNA, 32 nt, Human
uuccuuucuuucucugaauuacugcuuuuucu

SEQ ID NO: 537190 - RNA, 22 nt, Human
uuccuuucuuuuccauccaaca

SEQ ID NO: 537191 - RNA, 32 nt, Human
uuccuuugaaagccagaacaauggaucggcuu

SEQ ID NO: 537192 - RNA, 32 nt, Human
uuccuuugacaaauuccuuuuccucuuaguuu

SEQ ID NO: 537193 - RNA, 32 nt, Human
uuccuuugagcagucuccuuuuacuuaugcac

SEQ ID NO: 537194 - RNA, 32 nt, Human
uuccuuugaguggugacccagcucuuugccuu

SEQ ID NO: 537195 - RNA, 32 nt, Human
uuccuuugaugugaaguacaugaauuuuuccu

SEQ ID NO: 537196 - RNA, 32 nt, Human
uuccuuugauugguccuugagugaccagagac

SEQ ID NO: 537197 - RNA, 32 nt, Human
uuccuuugccaaccuccguucuauuuaugugc

SEQ ID NO: 537198 - RNA, 32 nt, Human
uuccuuugccuaaaucucuccacuuauucuuu

SEQ ID NO: 537199 - RNA, 32 nt, Human
uuccuuugccugaagcuguuuugggaaggguc

SEQ ID NO: 537200 - RNA, 22 nt, Human
uuccuuugcucuuucccccuuc

SEQ ID NO: 537201 - RNA, 32 nt, Human
uuccuuugcuuaugccccaacccuuggcuauc

SEQ ID NO: 537202 - RNA, 32 nt, Human
uuccuuuggcuuugcauggcuuuucuucaggu

SEQ ID NO: 537203 - RNA, 32 nt, Human
uuccuuuggggugggaggauggcgggggcagg

SEQ ID NO: 537204 - RNA, 22 nt, Human
uuccuuugguacaaaaggguug

SEQ ID NO: 537205 - RNA, 32 nt, Human
uuccuuugguccugucuugcaucugucuugaa

SEQ ID NO: 537206 - RNA, 32 nt, Human
uuccuuuggucuucacucuaaucccuggaguu

SEQ ID NO: 537207 - RNA, 32 nt, Human
uuccuuuguauacuuguccuuccucccauuuc

SEQ ID NO: 537208 - RNA, 32 nt, Human
uuccuuuguuucccaugugcagucccaguugc

SEQ ID NO: 537209 - RNA, 19 nt, Human
uuccuuuuaagaaaaauga

SEQ ID NO: 537210 - RNA, 32 nt, Human
uuccuuuuagucuuuuucauccucuucucuuu

SEQ ID NO: 537211 - RNA, 32 nt, Human
uuccuuuuauaccucauucaucaugcuggauu

SEQ ID NO: 537212 - RNA, 29 nt, Human
uuccuuuucaauaaaaucagauuggaaca

SEQ ID NO: 537213 - RNA, 32 nt, Human
uuccuuuucauggaaccacccaccucccucuc

SEQ ID NO: 537214 - RNA, 32 nt, Human
uuccuuuuccaccacaggccccaaacugaucc

SEQ ID NO: 537215 - RNA, 32 nt, Human
uuccuuuuccccucaagaugucugagucagcu

SEQ ID NO: 537216 - RNA, 18 nt, Human
uuccuuuucccuuaaagg

SEQ ID NO: 537217 - RNA, 32 nt, Human
uuccuuuuccucauaccaacuugacuauguuu

SEQ ID NO: 537218 - RNA, 31 nt, Human
uuccuuuuccucuuggagguuggaguccccu

SEQ ID NO: 537219 - RNA, 32 nt, Human
uuccuuuucuccuuucuuuccuccuugaagcc

SEQ ID NO: 537220 - RNA, 32 nt, Human
uuccuuuugaagcucaacuguugccaggagau

SEQ ID NO: 537221 - RNA, 32 nt, Human
uuccuuuugagcccaucucagccagaaccagc

SEQ ID NO: 537222 - RNA, 32 nt, Human
uuccuuuugaggagcuggagggguggggagcu

SEQ ID NO: 537223 - RNA, 32 nt, Human
uuccuuuugccugguaaccaggaggaguggcu

SEQ ID NO: 537224 - RNA, 32 nt, Human
uuccuuuuguaaaccucugucucccaauuucu

SEQ ID NO: 537225 - RNA, 32 nt, Human
uuccuuuuguucuuccuuuacuucuccagcuu

SEQ ID NO: 537226 - RNA, 32 nt, Human
uuccuuuuuaaagcauagaaguaguauguggg

SEQ ID NO: 537227 - RNA, 32 nt, Human
uuccuuuuuagauugccaauuuugccaauuuu

SEQ ID NO: 537228 - RNA, 32 nt, Human
uuccuuuuucauuuucaagguuuacgcacugc

SEQ ID NO: 537229 - RNA, 32 nt, Human
uuccuuuuuccucuccucuccugccgagagug

SEQ ID NO: 537230 - RNA, 32 nt, Human
uuccuuuuuccuucccccuccuccacuccuac

SEQ ID NO: 537231 - RNA, 32 nt, Human
uuccuuuuucgaggauggaaagcuacugauug

SEQ ID NO: 537232 - RNA, 32 nt, Human
uuccuuuuugagacagggucuuacucuuguca

SEQ ID NO: 537233 - RNA, 32 nt, Human
uucgaaaccagccugaccaacguggagaaacc

SEQ ID NO: 537234 - RNA, 32 nt, Human
uucgaaaccagccuggccaaaacagugaaacc

SEQ ID NO: 537235 - RNA, 32 nt, Human
uucgaaaccagccuggccaacaaggugagacc

SEQ ID NO: 537236 - RNA, 24 nt, Human
uucgaaaccagccuggccaacaua

SEQ ID NO: 537237 - RNA, 32 nt, Human
uucgaaaccagccuggccaacauagugaaacc

SEQ ID NO: 537238 - RNA, 24 nt, Human
uucgaaaccagccuggccaacaug

SEQ ID NO: 537239 - RNA, 32 nt, Human
uucgaaaccagccuggccaacauggagaaacc

SEQ ID NO: 537240 - RNA, 32 nt, Human
uucgaaaccagccuggccaacauggugaaacc

SEQ ID NO: 537241 - RNA, 32 nt, Human
uucgaaaccagccuggccaacuugaugaaacc

SEQ ID NO: 537242 - RNA, 32 nt, Human
uucgaaaccagccugggcaacauagugagacc

SEQ ID NO: 537243 - RNA, 24 nt, Human
uucgaaaccagccugggcaacgug

SEQ ID NO: 537244 - RNA, 32 nt, Human
uucgaaaccagccugugcaacacagcgagacc

SEQ ID NO: 537245 - RNA, 32 nt, Human
uucgaaaccagccuucccaacauggugaaacc

SEQ ID NO: 537246 - RNA, 24 nt, Human
uucgaaaccagcuuggccaacaug

SEQ ID NO: 537247 - RNA, 32 nt, Human
uucgaaacuagccuggccaacaucaugaaacc

SEQ ID NO: 537248 - RNA, 32 nt, Human
uucgaaagauggggcgccauguuucagagaac

SEQ ID NO: 537249 - RNA, 24 nt, Human
uucgaaaucagccuaggcaacaua

SEQ ID NO: 537250 - RNA, 32 nt, Human
uucgaaaucagccuaggcaacauaguaagacc

SEQ ID NO: 537251 - RNA, 32 nt, Human
uucgaaccagccuggccaacauggugaaacug

SEQ ID NO: 537252 - RNA, 23 nt, Human
uucgaaccaguuugggcaacaug

SEQ ID NO: 537253 - RNA, 32 nt, Human
uucgaaccaguuugggcaacauggcgaaaccc

SEQ ID NO: 537254 - RNA, 32 nt, Human
uucgaacucuguaaucccagcacuuugggagg

SEQ ID NO: 537255 - RNA, 32 nt, Human
uucgaagacacaugauaaggcacacuggagac

SEQ ID NO: 537256 - RNA, 32 nt, Human
uucgaagaggaaaugggaucagagaagccgcu

SEQ ID NO: 537257 - RNA, 32 nt, Human
uucgaagccagccugggcaacaaagugagacc

SEQ ID NO: 537258 - RNA, 32 nt, Human
uucgaagcucacugugccucuuguuuccgagg

SEQ ID NO: 537259 - RNA, 32 nt, Human
uucgaaggaacacauuaaacugguggaugcag

SEQ ID NO: 537260 - RNA, 32 nt, Human
uucgaagucacaugauaacacacacaggagau

SEQ ID NO: 537261 - RNA, 32 nt, Human
uucgaagucagccuggccaacguggugaaacc

SEQ ID NO: 537262 - RNA, 32 nt, Human
uucgaaucacaaucauugccacugugguuugc

SEQ ID NO: 537263 - RNA, 32 nt, Human
uucgaauggaaauggcauuucaugaggccucc

SEQ ID NO: 537264 - RNA, 32 nt, Human
uucgaauguauaauacuuccacagcaacaggu

SEQ ID NO: 537265 - RNA, 32 nt, Human
uucgacaccaaccugagcaacauggcgaaacc

SEQ ID NO: 537266 - RNA, 32 nt, Human
uucgacaccagccuggccaacacagugaaaug

SEQ ID NO: 537267 - RNA, 24 nt, Human
uucgacaccagccuggccaacaug

SEQ ID NO: 537268 - RNA, 32 nt, Human
uucgacaccagccuggccaacauggugaaacc

SEQ ID NO: 537269 - RNA, 32 nt, Human
uucgacaccaggcggauccgcucugcagcacg

SEQ ID NO: 537270 - RNA, 24 nt, Human
uucgacaccaucuugggcaacaug

SEQ ID NO: 537271 - RNA, 32 nt, Human
uucgacaccaucuugggcaacauggugaaacc

SEQ ID NO: 537272 - RNA, 24 nt, Human
uucgacacuagccuggccaacaua

SEQ ID NO: 537273 - RNA, 32 nt, Human
uucgacacugugggugaggccugguuuuuguu

SEQ ID NO: 537274 - RNA, 32 nt, Human
uucgacagaacugccguauaccuuuacccuca

SEQ ID NO: 537275 - RNA, 32 nt, Human
uucgacagcagugacagaucagugcauuuccc

SEQ ID NO: 537276 - RNA, 32 nt, Human
uucgacagggucucacuguauugcccagguug

SEQ ID NO: 537277 - RNA, 32 nt, Human
uucgacauuucaccggcaacaccaagaggguu

SEQ ID NO: 537278 - RNA, 29 nt, Human
uucgaccagcuucuuugugccucuuuucu

SEQ ID NO: 537279 - RNA, 32 nt, Human
uucgaccagcuucuuugugccucuuuucucuc

SEQ ID NO: 537280 - RNA, 32 nt, Human
uucgaccuccacugcgccccaccucccugccu

SEQ ID NO: 537281 - RNA, 32 nt, Human
uucgaccucuguuauaggcagucuucucuuua

SEQ ID NO: 537282 - RNA, 32 nt, Human
uucgaccuuggacuucucagccuccagaauga

SEQ ID NO: 537283 - RNA, 32 nt, Human
uucgacucacugcaaccucugccucccagguu

SEQ ID NO: 537284 - RNA, 32 nt, Human
uucgacugaaaacacaaaugugcucuagugcu

SEQ ID NO: 537285 - RNA, 32 nt, Human
uucgacugcucuguugagaggguggagacaga

SEQ ID NO: 537286 - RNA, 32 nt, Human
uucgacuucauuuugccaccucugccccaauu

SEQ ID NO: 537287 - RNA, 32 nt, Human
uucgacuuuucagagcccuccugcucacuuga

SEQ ID NO: 537288 - RNA, 24 nt, Human
uucgagaaaagccugggcaacaug

SEQ ID NO: 537289 - RNA, 32 nt, Human
uucgagaaaagccugggcaacauggugaaacc

SEQ ID NO: 537290 - RNA, 24 nt, Human
uucgagaacagucuggccaacaug

SEQ ID NO: 537291 - RNA, 32 nt, Human
uucgagaacagucuggccaacauggcgaaacc

SEQ ID NO: 537292 - RNA, 24 nt, Human
uucgagaagagccugggcaacaua

SEQ ID NO: 537293 - RNA, 32 nt, Human
uucgagaagagccugggcaacauagugagacc

SEQ ID NO: 537294 - RNA, 32 nt, Human
uucgagaauacccuggccaacauggugaaacc

SEQ ID NO: 537295 - RNA, 24 nt, Human
uucgagacaaaccugggcaaugug

SEQ ID NO: 537296 - RNA, 22 nt, Human
uucgagacaagccuggguaaca

SEQ ID NO: 537297 - RNA, 32 nt, Human
uucgagacagacauuugggacugaccucucua

SEQ ID NO: 537298 - RNA, 23 nt, Human
uucgagacagccuggccaacaug

SEQ ID NO: 537299 - RNA, 32 nt, Human
uucgagaccaaccgaccaacauggugaaaccc

SEQ ID NO: 537300 - RNA, 32 nt, Human
uucgagaccaaccuagccaacauggugaaacc

SEQ ID NO: 537301 - RNA, 32 nt, Human
uucgagaccaaccuggccaaaguggugaaacc

SEQ ID NO: 537302 - RNA, 32 nt, Human
uucgagaccaaccugggcaacauagugagauu

SEQ ID NO: 537303 - RNA, 24 nt, Human
uucgagaccaacuugggcaacaug

SEQ ID NO: 537304 - RNA, 32 nt, Human
uucgagaccaacuugggcaacauggugaaaca

SEQ ID NO: 537305 - RNA, 32 nt, Human
uucgagaccacccuggccaacauggcaaaacc

SEQ ID NO: 537306 - RNA, 32 nt, Human
uucgagaccacccuggccaacauggugaaacc

SEQ ID NO: 537307 - RNA, 32 nt, Human
uucgagaccacccuggccaacguggugaaacc

SEQ ID NO: 537308 - RNA, 32 nt, Human
uucgagaccacccuggccaauauggugaaacc

SEQ ID NO: 537309 - RNA, 24 nt, Human
uucgagaccacccugggcaacaug

SEQ ID NO: 537310 - RNA, 32 nt, Human
uucgagaccacccugggcaacauggugaaacc

SEQ ID NO: 537311 - RNA, 32 nt, Human
uucgagaccagacuggccaacauggagaaacc

SEQ ID NO: 537312 - RNA, 32 nt, Human
uucgagaccagcaugaccaacauggugaaacc

SEQ ID NO: 537313 - RNA, 32 nt, Human
uucgagaccagccagaccaacaugaugaaacc

SEQ ID NO: 537314 - RNA, 32 nt, Human
uucgagaccagccaggccaacauggugaaaac

SEQ ID NO: 537315 - RNA, 32 nt, Human
uucgagaccagccaggccaacauggugaaacc

SEQ ID NO: 537316 - RNA, 24 nt, Human
uucgagaccagccagggcaacaug

SEQ ID NO: 537317 - RNA, 32 nt, Human
uucgagaccagccagggcaacauggugaaacc

SEQ ID NO: 537318 - RNA, 32 nt, Human
uucgagaccagcccagccaacauggcaaaacc

SEQ ID NO: 537319 - RNA, 32 nt, Human
uucgagaccagcccagccaacauggcgaaacc

SEQ ID NO: 537320 - RNA, 32 nt, Human
uucgagaccagcccagccaauuuagugaaacc

SEQ ID NO: 537321 - RNA, 32 nt, Human
uucgagaccagcccgcccaauauggugaaacc

SEQ ID NO: 537322 - RNA, 32 nt, Human
uucgagaccagcccggccaacauggugaaacc

SEQ ID NO: 537323 - RNA, 32 nt, Human
uucgagaccagccgggccaacauggugaaacc

SEQ ID NO: 537324 - RNA, 24 nt, Human
uucgagaccagccggggcaacaua

SEQ ID NO: 537325 - RNA, 32 nt, Human
uucgagaccagccggggcaacauggcaaaacc

SEQ ID NO: 537326 - RNA, 32 nt, Human
uucgagaccagccuaaacaacauagugaaacc

SEQ ID NO: 537327 - RNA, 32 nt, Human
uucgagaccagccuaaccaacauggagaaacc

SEQ ID NO: 537328 - RNA, 32 nt, Human
uucgagaccagccuaaccaacauggugaaacc

SEQ ID NO: 537329 - RNA, 32 nt, Human
uucgagaccagccuagccaacauggugaaacc

SEQ ID NO: 537330 - RNA, 32 nt, Human
uucgagaccagccuagccaacauggugaacua

SEQ ID NO: 537331 - RNA, 32 nt, Human
uucgagaccagccuagcuaacauggcaaaacc

SEQ ID NO: 537332 - RNA, 32 nt, Human
uucgagaccagccuagcuaacaugguaaaacu

SEQ ID NO: 537333 - RNA, 24 nt, Human
uucgagaccagccuaggcaacaug

SEQ ID NO: 537334 - RNA, 32 nt, Human
uucgagaccagccuaggcaacauggagaaacc

SEQ ID NO: 537335 - RNA, 24 nt, Human
uucgagaccagccuaggugacaua

SEQ ID NO: 537336 - RNA, 32 nt, Human
uucgagaccagccuaggugacauagugagacc

SEQ ID NO: 537337 - RNA, 32 nt, Human
uucgagaccagccucaacauggagaaaccccg

SEQ ID NO: 537338 - RNA, 32 nt, Human
uucgagaccagccucagcaacacagugaaacc

SEQ ID NO: 537339 - RNA, 32 nt, Human
uucgagaccagccucgccaacauggcgaaacc

SEQ ID NO: 537340 - RNA, 32 nt, Human
uucgagaccagccugaacaacacggugaaacc

SEQ ID NO: 537341 - RNA, 32 nt, Human
uucgagaccagccugaacaacauggcaaaacc

SEQ ID NO: 537342 - RNA, 32 nt, Human
uucgagaccagccugaccaacacggugaaacc

SEQ ID NO: 537343 - RNA, 32 nt, Human
uucgagaccagccugaccaacauagugaaacc

SEQ ID NO: 537344 - RNA, 32 nt, Human
uucgagaccagccugaccaacaugacgaaacc

SEQ ID NO: 537345 - RNA, 32 nt, Human
uucgagaccagccugaccaacaugaugaaaug

SEQ ID NO: 537346 - RNA, 32 nt, Human
uucgagaccagccugaccaacauggagaaacc

SEQ ID NO: 537347 - RNA, 32 nt, Human
uucgagaccagccugaccaacauggagaaacu

SEQ ID NO: 537348 - RNA, 32 nt, Human
uucgagaccagccugaccaacauggagaaaug

SEQ ID NO: 537349 - RNA, 32 nt, Human
uucgagaccagccugaccaacauggagaagcc

SEQ ID NO: 537350 - RNA, 32 nt, Human
uucgagaccagccugaccaacauggagauauc

SEQ ID NO: 537351 - RNA, 32 nt, Human
uucgagaccagccugaccaacauggcaaaacc

SEQ ID NO: 537352 - RNA, 32 nt, Human
uucgagaccagccugaccaacauggcgaaacc

SEQ ID NO: 537353 - RNA, 32 nt, Human
uucgagaccagccugaccaacaugguaaaacc

SEQ ID NO: 537354 - RNA, 32 nt, Human
uucgagaccagccugaccaacauggugaaaac

SEQ ID NO: 537355 - RNA, 32 nt, Human
uucgagaccagccugaccaacauggugaaaca

SEQ ID NO: 537356 - RNA, 32 nt, Human
uucgagaccagccugaccaacauggugaaacc

SEQ ID NO: 537357 - RNA, 32 nt, Human
uucgagaccagccugaccaacauggugaaacg

SEQ ID NO: 537358 - RNA, 32 nt, Human
uucgagaccagccugaccaacauggugaaagc

SEQ ID NO: 537359 - RNA, 32 nt, Human
uucgagaccagccugaccaacauggugaaauc

SEQ ID NO: 537360 - RNA, 32 nt, Human
uucgagaccagccugaccaacauggugagacc

SEQ ID NO: 537361 - RNA, 32 nt, Human
uucgagaccagccugaccaacauggugaggcc

SEQ ID NO: 537362 - RNA, 32 nt, Human
uucgagaccagccugaccaacaugucgaaauc

SEQ ID NO: 537363 - RNA, 32 nt, Human
uucgagaccagccugaccaacguggagaaaca

SEQ ID NO: 537364 - RNA, 32 nt, Human
uucgagaccagccugaccaacguggugaaacc

SEQ ID NO: 537365 - RNA, 32 nt, Human
uucgagaccagccugaccaagaugaugaaacg

SEQ ID NO: 537366 - RNA, 32 nt, Human
uucgagaccagccugaccaauauggugaaacc

SEQ ID NO: 537367 - RNA, 32 nt, Human
uucgagaccagccugaccaccauggagaaacc

SEQ ID NO: 537368 - RNA, 32 nt, Human
uucgagaccagccugaccagcaugguggaacc

SEQ ID NO: 537369 - RNA, 32 nt, Human
uucgagaccagccugagaaacauagugagccc

SEQ ID NO: 537370 - RNA, 32 nt, Human
uucgagaccagccugagcaacacugugagacc

SEQ ID NO: 537371 - RNA, 24 nt, Human
uucgagaccagccugagcaacaug

SEQ ID NO: 537372 - RNA, 32 nt, Human
uucgagaccagccugagcaacauggcgaaacc

SEQ ID NO: 537373 - RNA, 32 nt, Human
uucgagaccagccugagcaacauggugaaacc

SEQ ID NO: 537374 - RNA, 32 nt, Human
uucgagaccagccugaucggcauggugaaacc

SEQ ID NO: 537375 - RNA, 32 nt, Human
uucgagaccagccugccaacauggugaaaccc

SEQ ID NO: 537376 - RNA, 32 nt, Human
uucgagaccagccugcccaaaaaggugaaacc

SEQ ID NO: 537377 - RNA, 32 nt, Human
uucgagaccagccugcccaaauggugaaaccc

SEQ ID NO: 537378 - RNA, 32 nt, Human
uucgagaccagccugcccaacauggugaaacc

SEQ ID NO: 537379 - RNA, 32 nt, Human
uucgagaccagccugcccaauauggugaaacc

SEQ ID NO: 537380 - RNA, 32 nt, Human
uucgagaccagccugccuaacauggugaaacc

SEQ ID NO: 537381 - RNA, 24 nt, Human
uucgagaccagccuggacaacaua

SEQ ID NO: 537382 - RNA, 32 nt, Human
uucgagaccagccuggacaacauagugagacc

SEQ ID NO: 537383 - RNA, 32 nt, Human
uucgagaccagccuggacaacaucgugaaacc

SEQ ID NO: 537384 - RNA, 32 nt, Human
uucgagaccagccuggacaacauugugaaacc

SEQ ID NO: 537385 - RNA, 32 nt, Human
uucgagaccagccuggcaaacauggcgaaacc

SEQ ID NO: 537386 - RNA, 23 nt, Human
uucgagaccagccuggcaacaug

SEQ ID NO: 537387 - RNA, 32 nt, Human
uucgagaccagccuggcaacauggcaagaccc

SEQ ID NO: 537388 - RNA, 32 nt, Human
uucgagaccagccuggccaaaauagugaaacu

SEQ ID NO: 537389 - RNA, 32 nt, Human
uucgagaccagccuggccaacaaggcaaaacc

SEQ ID NO: 537390 - RNA, 32 nt, Human
uucgagaccagccuggccaacaaggugaaacc

SEQ ID NO: 537391 - RNA, 32 nt, Human
uucgagaccagccuggccaacacggugaaaac

SEQ ID NO: 537392 - RNA, 32 nt, Human
uucgagaccagccuggccaacacggugaaacc

SEQ ID NO: 537393 - RNA, 32 nt, Human
uucgagaccagccuggccaacacggugagacc

SEQ ID NO: 537394 - RNA, 32 nt, Human
uucgagaccagccuggccaacacuggucucug

SEQ ID NO: 537395 - RNA, 24 nt, Human
uucgagaccagccuggccaacaua

SEQ ID NO: 537396 - RNA, 32 nt, Human
uucgagaccagccuggccaacauaaugaaacc

SEQ ID NO: 537397 - RNA, 32 nt, Human
uucgagaccagccuggccaacauagcaaaacc

SEQ ID NO: 537398 - RNA, 32 nt, Human
uucgagaccagccuggccaacauagcgagagc

SEQ ID NO: 537399 - RNA, 32 nt, Human
uucgagaccagccuggccaacauagugaaacc

SEQ ID NO: 537400 - RNA, 24 nt, Human
uucgagaccagccuggccaacaug

SEQ ID NO: 537401 - RNA, 32 nt, Human
uucgagaccagccuggccaacaugacgaaacc

SEQ ID NO: 537402 - RNA, 32 nt, Human
uucgagaccagccuggccaacaugaugaaacc

SEQ ID NO: 537403 - RNA, 32 nt, Human
uucgagaccagccuggccaacaugccuccagg

SEQ ID NO: 537404 - RNA, 32 nt, Human
uucgagaccagccuggccaacauggcaaaacc

SEQ ID NO: 537405 - RNA, 32 nt, Human
uucgagaccagccuggccaacauggcaaaauc

SEQ ID NO: 537406 - RNA, 32 nt, Human
uucgagaccagccuggccaacauggcaagacc

SEQ ID NO: 537407 - RNA, 32 nt, Human
uucgagaccagccuggccaacauggcgaaaac

SEQ ID NO: 537408 - RNA, 32 nt, Human
uucgagaccagccuggccaacauggcgaaaca

SEQ ID NO: 537409 - RNA, 32 nt, Human
uucgagaccagccuggccaacauggcgaaacc

SEQ ID NO: 537410 - RNA, 32 nt, Human
uucgagaccagccuggccaacauggcgaaacu

SEQ ID NO: 537411 - RNA, 32 nt, Human
uucgagaccagccuggccaacauggcgaaauc

SEQ ID NO: 537412 - RNA, 32 nt, Human
uucgagaccagccuggccaacauggcggaacc

SEQ ID NO: 537413 - RNA, 32 nt, Human
uucgagaccagccuggccaacaugguaaaacc

SEQ ID NO: 537414 - RNA, 32 nt, Human
uucgagaccagccuggccaacaugguaaaacu

SEQ ID NO: 537415 - RNA, 32 nt, Human
uucgagaccagccuggccaacaugguaaacgc

SEQ ID NO: 537416 - RNA, 32 nt, Human
uucgagaccagccuggccaacauggucaaaac

SEQ ID NO: 537417 - RNA, 32 nt, Human
uucgagaccagccuggccaacauggugaaaac

SEQ ID NO: 537418 - RNA, 31 nt, Human
uucgagaccagccuggccaacauggugaaac

SEQ ID NO: 537419 - RNA, 32 nt, Human
uucgagaccagccuggccaacauggugaaacc

SEQ ID NO: 537420 - RNA, 32 nt, Human
uucgagaccagccuggccaacauggugaaacg

SEQ ID NO: 537421 - RNA, 32 nt, Human
uucgagaccagccuggccaacauggugaaacu

SEQ ID NO: 537422 - RNA, 32 nt, Human
uucgagaccagccuggccaacauggugaaccc

SEQ ID NO: 537423 - RNA, 32 nt, Human
uucgagaccagccuggccaacauggugaagcc

SEQ ID NO: 537424 - RNA, 32 nt, Human
uucgagaccagccuggccaacauggugauacc

SEQ ID NO: 537425 - RNA, 32 nt, Human
uucgagaccagccuggccaacauggugugaga

SEQ ID NO: 537426 - RNA, 32 nt, Human
uucgagaccagccuggccaacaugguuaaacc

SEQ ID NO: 537427 - RNA, 32 nt, Human
uucgagaccagccuggccaacaugucgaacuc

SEQ ID NO: 537428 - RNA, 32 nt, Human
uucgagaccagccuggccaaccaacaugguga

SEQ ID NO: 537429 - RNA, 32 nt, Human
uucgagaccagccuggccaacccagccugguc

SEQ ID NO: 537430 - RNA, 24 nt, Human
uucgagaccagccuggccaacgug

SEQ ID NO: 537431 - RNA, 32 nt, Human
uucgagaccagccuggccaacguggugaaacc

SEQ ID NO: 537432 - RNA, 32 nt, Human
uucgagaccagccuggccaacguggugaaacg

SEQ ID NO: 537433 - RNA, 32 nt, Human
uucgagaccagccuggccaacugccugaaacc

SEQ ID NO: 537434 - RNA, 32 nt, Human
uucgagaccagccuggccaacuuggugaaacc

SEQ ID NO: 537435 - RNA, 32 nt, Human
uucgagaccagccuggccaagagaccagccug

SEQ ID NO: 537436 - RNA, 32 nt, Human
uucgagaccagccuggccaagauggcgaaacg

SEQ ID NO: 537437 - RNA, 32 nt, Human
uucgagaccagccuggccaauaaggugaaacc

SEQ ID NO: 537438 - RNA, 32 nt, Human
uucgagaccagccuggccaauaaggugaaacu

SEQ ID NO: 537439 - RNA, 32 nt, Human
uucgagaccagccuggccaauacggcaaaacc

SEQ ID NO: 537440 - RNA, 24 nt, Human
uucgagaccagccuggccaauaug

SEQ ID NO: 537441 - RNA, 32 nt, Human
uucgagaccagccuggccaauaugcaauaugg

SEQ ID NO: 537442 - RNA, 32 nt, Human
uucgagaccagccuggccaauauggugaaacc

SEQ ID NO: 537443 - RNA, 24 nt, Human
uucgagaccagccuggccaaugug

SEQ ID NO: 537444 - RNA, 32 nt, Human
uucgagaccagccuggccaauguggugaaacc

SEQ ID NO: 537445 - RNA, 32 nt, Human
uucgagaccagccuggccacauggcaaaaccc

SEQ ID NO: 537446 - RNA, 32 nt, Human
uucgagaccagccuggccacauggugaaaccc

SEQ ID NO: 537447 - RNA, 32 nt, Human
uucgagaccagccuggccagcaaggugaaacc

SEQ ID NO: 537448 - RNA, 24 nt, Human
uucgagaccagccuggccagcaug

SEQ ID NO: 537449 - RNA, 32 nt, Human
uucgagaccagccuggccagcauggcaaaacc

SEQ ID NO: 537450 - RNA, 32 nt, Human
uucgagaccagccuggccagcauggcgaaacc

SEQ ID NO: 537451 - RNA, 32 nt, Human
uucgagaccagccuggccagcauggugaaacc

SEQ ID NO: 537452 - RNA, 32 nt, Human
uucgagaccagccuggccagcauggugaaacu

SEQ ID NO: 537453 - RNA, 32 nt, Human
uucgagaccagccuggccagcauggugagacc

SEQ ID NO: 537454 - RNA, 32 nt, Human
uucgagaccagccuggccagcgguuccaguga

SEQ ID NO: 537455 - RNA, 32 nt, Human
uucgagaccagccuggccauuauggugaaacc

SEQ ID NO: 537456 - RNA, 32 nt, Human
uucgagaccagccuggcccacauggugaaacc

SEQ ID NO: 537457 - RNA, 24 nt, Human
uucgagaccagccuggcuaacaug

SEQ ID NO: 537458 - RNA, 32 nt, Human
uucgagaccagccuggcuaacauggcaaaacc

SEQ ID NO: 537459 - RNA, 32 nt, Human
uucgagaccagccuggcuaacauggugaaacc

SEQ ID NO: 537460 - RNA, 32 nt, Human
uucgagaccagccuggcuggcuagcaugguga

SEQ ID NO: 537461 - RNA, 24 nt, Human
uucgagaccagccugggaagcaug

SEQ ID NO: 537462 - RNA, 32 nt, Human
uucgagaccagccugggagacagagcauggaa

SEQ ID NO: 537463 - RNA, 21 nt, Human
uucgagaccagccugggcaac

SEQ ID NO: 537464 - RNA, 22 nt, Human
uucgagaccagccugggcaaca

SEQ ID NO: 537465 - RNA, 32 nt, Human
uucgagaccagccugggcaacaaagugagacu

SEQ ID NO: 537466 - RNA, 32 nt, Human
uucgagaccagccugggcaacacagaggaccc

SEQ ID NO: 537467 - RNA, 32 nt, Human
uucgagaccagccugggcaacacagcgagaac

SEQ ID NO: 537468 - RNA, 32 nt, Human
uucgagaccagccugggcaacacagcgagauc

SEQ ID NO: 537469 - RNA, 32 nt, Human
uucgagaccagccugggcaacagcaagaccuc

SEQ ID NO: 537470 - RNA, 24 nt, Human
uucgagaccagccugggcaacaua

SEQ ID NO: 537471 - RNA, 32 nt, Human
uucgagaccagccugggcaacauagagagacc

SEQ ID NO: 537472 - RNA, 32 nt, Human
uucgagaccagccugggcaacauagcaagacc

SEQ ID NO: 537473 - RNA, 32 nt, Human
uucgagaccagccugggcaacauagugagacc

SEQ ID NO: 537474 - RNA, 32 nt, Human
uucgagaccagccugggcaacauagugagacu

SEQ ID NO: 537475 - RNA, 32 nt, Human
uucgagaccagccugggcaacauaugagaaac

SEQ ID NO: 537476 - RNA, 32 nt, Human
uucgagaccagccugggcaacauaugggacac

SEQ ID NO: 537477 - RNA, 32 nt, Human
uucgagaccagccugggcaacaucgggagacc

SEQ ID NO: 537478 - RNA, 24 nt, Human
uucgagaccagccugggcaacaug

SEQ ID NO: 537479 - RNA, 32 nt, Human
uucgagaccagccugggcaacauggagagacc

SEQ ID NO: 537480 - RNA, 32 nt, Human
uucgagaccagccugggcaacauggcgagacc

SEQ ID NO: 537481 - RNA, 32 nt, Human
uucgagaccagccugggcaacauggugaaacc

SEQ ID NO: 537482 - RNA, 32 nt, Human
uucgagaccagccugggcaacauggugaaauc

SEQ ID NO: 537483 - RNA, 32 nt, Human
uucgagaccagccugggcaacauggugagacc

SEQ ID NO: 537484 - RNA, 32 nt, Human
uucgagaccagccugggcaaccuaaugagagu

SEQ ID NO: 537485 - RNA, 22 nt, Human
uucgagaccagccugggcaacg

SEQ ID NO: 537486 - RNA, 32 nt, Human
uucgagaccagccugggcaacgcagugagaga

SEQ ID NO: 537487 - RNA, 24 nt, Human
uucgagaccagccugggcaacgug

SEQ ID NO: 537488 - RNA, 32 nt, Human
uucgagaccagccugggcaacguggcgaaauc

SEQ ID NO: 537489 - RNA, 32 nt, Human
uucgagaccagccugggcaacguggugaaacc

SEQ ID NO: 537490 - RNA, 24 nt, Human
uucgagaccagccugggcaagaug

SEQ ID NO: 537491 - RNA, 32 nt, Human
uucgagaccagccugggcaagauggcaagacc

SEQ ID NO: 537492 - RNA, 32 nt, Human
uucgagaccagccugggcaagauggugaaacc

SEQ ID NO: 537493 - RNA, 24 nt, Human
uucgagaccagccugggcagcaua

SEQ ID NO: 537494 - RNA, 32 nt, Human
uucgagaccagccugggcagcauagcaagacc

SEQ ID NO: 537495 - RNA, 32 nt, Human
uucgagaccagccugggcagcauagcaagauc

SEQ ID NO: 537496 - RNA, 32 nt, Human
uucgagaccagccugggcaucguagugagacu

SEQ ID NO: 537497 - RNA, 32 nt, Human
uucgagaccagccugggccacaugacaaagcc

SEQ ID NO: 537498 - RNA, 22 nt, Human
uucgagaccagccugggcgaca

SEQ ID NO: 537499 - RNA, 32 nt, Human
uucgagaccagccugggcgacacggugaaacc

SEQ ID NO: 537500 - RNA, 24 nt, Human
uucgagaccagccugggcuacaua

SEQ ID NO: 537501 - RNA, 32 nt, Human
uucgagaccagccugggcuacauagugagacc

SEQ ID NO: 537502 - RNA, 22 nt, Human
uucgagaccagccuggguaaca

SEQ ID NO: 537503 - RNA, 32 nt, Human
uucgagaccagccuggguaacauagcuagacc

SEQ ID NO: 537504 - RNA, 23 nt, Human
uucgagaccagccugguaacaug

SEQ ID NO: 537505 - RNA, 24 nt, Human
uucgagaccagccuggucaacaug

SEQ ID NO: 537506 - RNA, 32 nt, Human
uucgagaccagccuggucaacauggcaaaaca

SEQ ID NO: 537507 - RNA, 32 nt, Human
uucgagaccagccuggucaacauggcgaaauc

SEQ ID NO: 537508 - RNA, 32 nt, Human
uucgagaccagccuggucaacauggugaaacc

SEQ ID NO: 537509 - RNA, 32 nt, Human
uucgagaccagccuggucaacuuggugaaaac

SEQ ID NO: 537510 - RNA, 32 nt, Human
uucgagaccagccuggucaagauggugaaacc

SEQ ID NO: 537511 - RNA, 32 nt, Human
uucuuagguuuggaacagucuggucuccugug

SEQ ID NO: 537512 - RNA, 32 nt, Human
uucuuaguaucaagauucucagauucucuuug

SEQ ID NO: 537513 - RNA, 32 nt, Human
uucuuaguaugauuguacaguaaugaaugaaa

SEQ ID NO: 537514 - RNA, 32 nt, Human
uucuuagucccagcuucugcccagggaggcuu

SEQ ID NO: 537515 - RNA, 32 nt, Human
uucuuagugugguuuauugacaaucauuuaca

SEQ ID NO: 537516 - RNA, 32 nt, Human
uucuuaguguuugacacuccauauuucuuuuu

SEQ ID NO: 537517 - RNA, 32 nt, Human
uucuuauaauaugaaugcugauauuuaaaggu

SEQ ID NO: 537518 - RNA, 32 nt, Human
uucuuauagaauaaccugggcccaagugauuu

SEQ ID NO: 537519 - RNA, 32 nt, Human
uucuuauaguaagcggcgggcucgccagccuc

SEQ ID NO: 537520 - RNA, 32 nt, Human
uucuuauaguugcugacauuaauugcaagaaa

SEQ ID NO: 537521 - RNA, 32 nt, Human
uucuuaucaauauuuucuauaucacaaaaaug

SEQ ID NO: 537522 - RNA, 32 nt, Human
uucuuaucagaauaucuggcuggcccuguaau

SEQ ID NO: 537523 - RNA, 32 nt, Human
uucuuaucagucugacaaucucugccuuuuga

SEQ ID NO: 537524 - RNA, 32 nt, Human
uucuuaucuccagcucacaccuuuaagucuua

SEQ ID NO: 537525 - RNA, 32 nt, Human
uucuuaugaaagugcuugagcuuuuaaccagg

SEQ ID NO: 537526 - RNA, 21 nt, Human
uucuuauguuaucaccuucca

SEQ ID NO: 537527 - RNA, 32 nt, Human
uucuuauuaagccuguggaauugugagucaau

SEQ ID NO: 537528 - RNA, 32 nt, Human
uucuuauuacuggguggacugauaauauuuaa

SEQ ID NO: 537529 - RNA, 32 nt, Human
uucuuauuaggggaauuuuaagagcacaaaaa

SEQ ID NO: 537530 - RNA, 32 nt, Human
uucuuauuauucacugcacuauauucuaagca

SEQ ID NO: 537531 - RNA, 32 nt, Human
uucuuauucaccugaagaauuuugccacucgu

SEQ ID NO: 537532 - RNA, 32 nt, Human
uucuuauucagacuggccuuaaaacaagcucu

SEQ ID NO: 537533 - RNA, 32 nt, Human
uucuuauucauucuaggcaugacuccuauaua

SEQ ID NO: 537534 - RNA, 32 nt, Human
uucuuauuccacccuuucuggugucuauagga

SEQ ID NO: 537535 - RNA, 32 nt, Human
uucuuauucuaacuguggaugccaccggcuuc

SEQ ID NO: 537536 - RNA, 32 nt, Human
uucuuauucucccacaucccuacccacguuug

SEQ ID NO: 537537 - RNA, 32 nt, Human
uucuuauugcagugccuggugcuaggaagugc

SEQ ID NO: 537538 - RNA, 32 nt, Human
uucuuauugcccaggcuugagugcaaugaccu

SEQ ID NO: 537539 - RNA, 32 nt, Human
uucuuauuuacccuuuucucccuucccauuuc

SEQ ID NO: 537540 - RNA, 32 nt, Human
uucuuauuuuuaguaucccugugaauuacugu

SEQ ID NO: 537541 - RNA, 32 nt, Human
uucuucaaagcaagcaggagaaucucuaaaug

SEQ ID NO: 537542 - RNA, 32 nt, Human
uucuucaaagccccagcccuuuuggagguuac

SEQ ID NO: 537543 - RNA, 32 nt, Human
uucuucaaagcccccuccuccaugagagggga

SEQ ID NO: 537544 - RNA, 32 nt, Human
uucuucaaaggauuuaacauuuuaagugggag

SEQ ID NO: 537545 - RNA, 32 nt, Human
uucuucaaaggauuuuuauaggcuguggguuu

SEQ ID NO: 537546 - RNA, 21 nt, Human
uucuucaaagggaagcaacuu

SEQ ID NO: 537547 - RNA, 32 nt, Human
uucuucaacaaacuuacuuuuguuaaauuaaa

SEQ ID NO: 537548 - RNA, 32 nt, Human
uucuucaacaugcucaucaaguaccaguccuc

SEQ ID NO: 537549 - RNA, 32 nt, Human
uucuucaaccagugaucccccaccucggucac

SEQ ID NO: 537550 - RNA, 32 nt, Human
uucuucaacugcuugcuuuucccaggcuugcc

SEQ ID NO: 537551 - RNA, 32 nt, Human
uucuucaagaccuucacugcucugccucagug

SEQ ID NO: 537552 - RNA, 32 nt, Human
uucuucaagcugucugugucuuugugugucug

SEQ ID NO: 537553 - RNA, 32 nt, Human
uucuucaauaaauauuaucuuaauaucaguaa

SEQ ID NO: 537554 - RNA, 19 nt, Human
uucuucaaugcugcugcug

SEQ ID NO: 537555 - RNA, 32 nt, Human
uucuucacacuaugccucuuacuucauggaga

SEQ ID NO: 537556 - RNA, 32 nt, Human
uucuucacaggcacuccuggagauaugaagga

SEQ ID NO: 537557 - RNA, 32 nt, Human
uucuucaccagauuuaaauaaaaggaggaauu

SEQ ID NO: 537558 - RNA, 32 nt, Human
uucuucacccgucccuaccaggccaacucggc

SEQ ID NO: 537559 - RNA, 19 nt, Human
uucuucacuccugcugcug

SEQ ID NO: 537560 - RNA, 32 nt, Human
uucuucacugccuuuucucggugugguauuug

SEQ ID NO: 537561 - RNA, 32 nt, Human
uucuucacuggaauggcuucagcauggaaucu

SEQ ID NO: 537562 - RNA, 32 nt, Human
uucuucagagaguucauggcccagggagggaa

SEQ ID NO: 537563 - RNA, 24 nt, Human
uucuucagaugauggggagcacuu

SEQ ID NO: 537564 - RNA, 32 nt, Human
uucuucagcaggaagggugggaagggauaauu

SEQ ID NO: 537565 - RNA, 22 nt, Human
uucuucagccaagagggcacuu

SEQ ID NO: 537566 - RNA, 32 nt, Human
uucuucagccaagagggcacuuguuaauauga

SEQ ID NO: 537567 - RNA, 32 nt, Human
uucuucagccccacccccuccccacuagcucg

SEQ ID NO: 537568 - RNA, 32 nt, Human
uucuucagccuccaucccuggccuccuccccu

SEQ ID NO: 537569 - RNA, 32 nt, Human
uucuucagccucccgaguagcugagauuauag

SEQ ID NO: 537570 - RNA, 32 nt, Human
uucuucagccuccucugacuuuucuuuugggg

SEQ ID NO: 537571 - RNA, 32 nt, Human
uucuucagccuucuucagccuucuucagcccu

SEQ ID NO: 537572 - RNA, 32 nt, Human
uucuucagcugcugggggagugccagacagga

SEQ ID NO: 537573 - RNA, 32 nt, Human
uucuucagcugugccaucugcugcccaccaag

SEQ ID NO: 537574 - RNA, 32 nt, Human
uucuucaggaaggaagagaccugggcacccaa

SEQ ID NO: 537575 - RNA, 22 nt, Human
uucuucaggaccugacuggaca

SEQ ID NO: 537576 - RNA, 32 nt, Human
uucuucaggacucaggcuucuccaucauucuc

SEQ ID NO: 537577 - RNA, 32 nt, Human
uucuucaggcagccggugcacaguggacuuuu

SEQ ID NO: 537578 - RNA, 32 nt, Human
uucuucaggcccucccaaauugcccuugcccu

SEQ ID NO: 537579 - RNA, 22 nt, Human
uucuucaggcugaggaggacuu

SEQ ID NO: 537580 - RNA, 32 nt, Human
uucuucaggcugaggaggacuugcucaggccg

SEQ ID NO: 537581 - RNA, 32 nt, Human
uucuucagggaagaguagggacgccguuccag

SEQ ID NO: 537582 - RNA, 32 nt, Human
uucuucagguacugucucgguaucauucugcu

SEQ ID NO: 537583 - RNA, 32 nt, Human
uucuucagguuugagagaagauaaaaacauuu

SEQ ID NO: 537584 - RNA, 22 nt, Human
uucuucagucucuggggagcac

SEQ ID NO: 537585 - RNA, 32 nt, Human
uucuucagugaugucuccauccuugaucuuca

SEQ ID NO: 537586 - RNA, 32 nt, Human
uucuucaguggacaugaccccacccagccccc

SEQ ID NO: 537587 - RNA, 32 nt, Human
uucuucaguuuucuuuucuugcacugaucuuu

SEQ ID NO: 537588 - RNA, 32 nt, Human
uucuucauauuccugcuguuggaagcaguuga

SEQ ID NO: 537589 - RNA, 32 nt, Human
uucuucaucugucaaaugagaguaaucaugcc

SEQ ID NO: 537590 - RNA, 32 nt, Human
uucuucaugaacauaacucugcugaauguaaa

SEQ ID NO: 537591 - RNA, 32 nt, Human
uucuucauggaauugaaggccccuaugugcug

SEQ ID NO: 537592 - RNA, 32 nt, Human
uucuucauggauauucuuggucucacauacuu

SEQ ID NO: 537593 - RNA, 32 nt, Human
uucuucauucuagaaauuuauuuuggauaaau

SEQ ID NO: 537594 - RNA, 32 nt, Human
uucuucauuucugcuuucugcccugucaguuu

SEQ ID NO: 537595 - RNA, 32 nt, Human
uucuucauuuucuucuugauucagggcuucuu

SEQ ID NO: 537596 - RNA, 32 nt, Human
uucuuccacagcaaaugagauguaugcccaaa

SEQ ID NO: 537597 - RNA, 32 nt, Human
uucuuccacaguucagcaaacaacugcuagcu

SEQ ID NO: 537598 - RNA, 32 nt, Human
uucuuccacccacaaacuccaggcuggaagua

SEQ ID NO: 537599 - RNA, 32 nt, Human
uucuuccaccuccuccucuuccucagacaacc

SEQ ID NO: 537600 - RNA, 32 nt, Human
uucuuccaccugcuugauugugccaguguuug

SEQ ID NO: 537601 - RNA, 32 nt, Human
uucuuccacuggcuccacauccaccccacugg

SEQ ID NO: 537602 - RNA, 32 nt, Human
uucuuccagaagcacgggcacaggagcauguu

SEQ ID NO: 537603 - RNA, 32 nt, Human
uucuuccagcacucuggccuccuugcuguucu

SEQ ID NO: 537604 - RNA, 32 nt, Human
uucuuccagccaagccucuccacuccuuccac

SEQ ID NO: 537605 - RNA, 32 nt, Human
uucuuccagcgauggucucccacucagagcug

SEQ ID NO: 537606 - RNA, 32 nt, Human
uucuuccaucagcucugcaccaaaaagcuuuu

SEQ ID NO: 537607 - RNA, 32 nt, Human
uucuuccaugauuuuaagggcuuucuuuuuaa

SEQ ID NO: 537608 - RNA, 32 nt, Human
uucuuccaugucuuugaccacaggguuguugc

SEQ ID NO: 537609 - RNA, 32 nt, Human
uucuucccacucuggggguuucuaucacugug

SEQ ID NO: 537610 - RNA, 32 nt, Human
uucuucccagcacccagagaauccuuccucag

SEQ ID NO: 537611 - RNA, 32 nt, Human
uucuucccaguaaccacuauucuauuuugucu

SEQ ID NO: 537612 - RNA, 32 nt, Human
uucuucccauagcuuccagccugguggggaau

SEQ ID NO: 537613 - RNA, 32 nt, Human
uucuucccaucuggccagccuugugugaaaau

SEQ ID NO: 537614 - RNA, 32 nt, Human
uucuucccauuuccuggcacacucugccccuc

SEQ ID NO: 537615 - RNA, 32 nt, Human
uucuuccccacagcaggcugcucagagggggu

SEQ ID NO: 537616 - RNA, 32 nt, Human
uucuuccccauucuucccagcagcccaaagcu

SEQ ID NO: 537617 - RNA, 32 nt, Human
uucuucccccuucacgugaacugccuccauga

SEQ ID NO: 537618 - RNA, 32 nt, Human
uucuuccccgagggugcauguugcaggaggga

SEQ ID NO: 537619 - RNA, 32 nt, Human
uucuuccccucaccccugcuuauuaacacaau

SEQ ID NO: 537620 - RNA, 32 nt, Human
uucuuccccucacuacccagaucucugccugc

SEQ ID NO: 537621 - RNA, 32 nt, Human
uucuuccccuuguguuuccagucaccuaacuu

SEQ ID NO: 537622 - RNA, 32 nt, Human
uucuucccuccacccucacuccaaccacccca

SEQ ID NO: 537623 - RNA, 32 nt, Human
uucuucccuccccugcuugucuauuuucuucu

SEQ ID NO: 537624 - RNA, 32 nt, Human
uucuucccuccuccccugucucuggcugucuc

SEQ ID NO: 537625 - RNA, 32 nt, Human
uucuucccucugagagugggggaggacggcgg

SEQ ID NO: 537626 - RNA, 32 nt, Human
uucuucccucuguuauucauucaucaagcagg

SEQ ID NO: 537627 - RNA, 32 nt, Human
uucuucccugcucuguccccuaagcucccucc

SEQ ID NO: 537628 - RNA, 32 nt, Human
uucuucccugugugauuuuugccaucaaaaua

SEQ ID NO: 537629 - RNA, 32 nt, Human
uucuucccuuccccuucuccccacaccugcac

SEQ ID NO: 537630 - RNA, 32 nt, Human
uucuucccuucccuucccuucccuuuccuuuu

SEQ ID NO: 537631 - RNA, 32 nt, Human
uucuucccuuccuuuuucccugccucccuuuu

SEQ ID NO: 537632 - RNA, 32 nt, Human
uucuucccuuuccucugcuguuuccuucuugu

SEQ ID NO: 537633 - RNA, 32 nt, Human
uucuucccuuuuccuuucuauucucuuucaag

SEQ ID NO: 537634 - RNA, 32 nt, Human
uucuuccgccuauuaaacuuuccgcuucuuaa

SEQ ID NO: 537635 - RNA, 32 nt, Human
uucuuccuaccuucuuccuuuuugacuaaaua

SEQ ID NO: 537636 - RNA, 32 nt, Human
uucuuccucacugcacccccagcccugcaccc

SEQ ID NO: 537637 - RNA, 32 nt, Human
uucuuccucagggcucuuguucucccagaagc

SEQ ID NO: 537638 - RNA, 32 nt, Human
uucuuccucauuuuucucuugcugcagccaug

SEQ ID NO: 537639 - RNA, 32 nt, Human
uucuuccuccaacucuauccuuuucuuaugac

SEQ ID NO: 537640 - RNA, 32 nt, Human
uucuuccucccaggcccaguggguggaaucug

SEQ ID NO: 537641 - RNA, 32 nt, Human
uucuuccucccuuucuccuucuccccuccuuc

SEQ ID NO: 537642 - RNA, 32 nt, Human
uucuuccuccuucguuucuuccuuuccuccuc

SEQ ID NO: 537643 - RNA, 32 nt, Human
uucuuccucuacccuuccgaaggauccaguau

SEQ ID NO: 537644 - RNA, 19 nt, Human
uucuuccucuuaucuaccu

SEQ ID NO: 537645 - RNA, 32 nt, Human
uucuuccucuucguucuucaccuggguuuccu

SEQ ID NO: 537646 - RNA, 32 nt, Human
uucuuccucuucuccuugggccaguuaauaau

SEQ ID NO: 537647 - RNA, 19 nt, Human
uucuuccugcaauacagug

SEQ ID NO: 537648 - RNA, 32 nt, Human
uucuuccugccacccuuugggcucagaggagg

SEQ ID NO: 537649 - RNA, 32 nt, Human
uucuuccugccaugcagaacuggacuugaguu

SEQ ID NO: 537650 - RNA, 32 nt, Human
uucuuccugccugcuugucuguuccuauauua

SEQ ID NO: 537651 - RNA, 32 nt, Human
uucuuccugccuggcuugucuguuccuauauu

SEQ ID NO: 537652 - RNA, 32 nt, Human
uucuuccugggcagguccuggagcggcuguuc

SEQ ID NO: 537653 - RNA, 32 nt, Human
uucuuccugucauaaccagcugccuuaguaga

SEQ ID NO: 537654 - RNA, 32 nt, Human
uucuuccugucugaucugaaugccuuuuauuu

SEQ ID NO: 537655 - RNA, 32 nt, Human
uucuuccuguucugggaaucaauguaacagcc

SEQ ID NO: 537656 - RNA, 32 nt, Human
uucuuccuguucugugcuguguauagugccac

SEQ ID NO: 537657 - RNA, 32 nt, Human
uucuuccuuccaggaugguguauggugaggca

SEQ ID NO: 537658 - RNA, 32 nt, Human
uucuuccuucuuucucuucccuccuucccuuc

SEQ ID NO: 537659 - RNA, 32 nt, Human
uucuuccuucuuucuuccuuuuucucucuccu

SEQ ID NO: 537660 - RNA, 32 nt, Human
uucuuccuuguccuaccccaggggccgggcca

SEQ ID NO: 537661 - RNA, 32 nt, Human
uucuuccuuuccaaccccuuccuuccuuuucc

SEQ ID NO: 537662 - RNA, 32 nt, Human
uucuuccuuucccauucaccuggcucaauccu

SEQ ID NO: 537663 - RNA, 32 nt, Human
uucuuccuuuuaccuagaaugccucauuuaaa

SEQ ID NO: 537664 - RNA, 32 nt, Human
uucuucgacuacauacugcagcagaaccagca

SEQ ID NO: 537665 - RNA, 32 nt, Human
uucuucgagacagggucucacucugucaccca

SEQ ID NO: 537666 - RNA, 32 nt, Human
uucuucgcucaguaugaagaaaagcaacccaa

SEQ ID NO: 537667 - RNA, 32 nt, Human
uucuucgcuuccaccuuuuucucccccacacu

SEQ ID NO: 537668 - RNA, 32 nt, Human
uucuucggcagugcuggauaaagugggaugau

SEQ ID NO: 537669 - RNA, 32 nt, Human
uucuucggugacacuggcauugcuggguggug

SEQ ID NO: 537670 - RNA, 32 nt, Human
uucuucggugacacuggcguugcuggguggca

SEQ ID NO: 537671 - RNA, 32 nt, Human
uucuucggugacacuggcguugcuggguggcg

SEQ ID NO: 537672 - RNA, 32 nt, Human
uucuucuaacugacuucugcuuuccacggcgu

SEQ ID NO: 537673 - RNA, 31 nt, Human
uucuucuaagcgacuucgaugccaaggaagu

SEQ ID NO: 537674 - RNA, 32 nt, Human
uucuucuacauccuccccauuucuguacugaa

SEQ ID NO: 537675 - RNA, 32 nt, Human
uucuucuacugcccuuaacucugguauacacc

SEQ ID NO: 537676 - RNA, 32 nt, Human
uucuucuacuuuccccagcucuucccaccuug

SEQ ID NO: 537677 - RNA, 20 nt, Human
uucuucuagagaaaaaggga

SEQ ID NO: 537678 - RNA, 32 nt, Human
uucuucuagcagucugugccuccucucugacc

SEQ ID NO: 537679 - RNA, 32 nt, Human
uucuucuauaaauguuuuucccugcacaacaa

SEQ ID NO: 537680 - RNA, 32 nt, Human
uucuucuaucuccccucuauacuuccucugca

SEQ ID NO: 537681 - RNA, 32 nt, Human
uucuucuauuuagaaggugaccuccugacagc

SEQ ID NO: 537682 - RNA, 32 nt, Human
uucuucuauuuuuaguagagacaggguuucac

SEQ ID NO: 537683 - RNA, 32 nt, Human
uucuucucaccuuguucucugccuccagagga

SEQ ID NO: 537684 - RNA, 32 nt, Human
uucuucuccauugggaaugaaggugucaggcg

SEQ ID NO: 537685 - RNA, 32 nt, Human
uucuucucccccagugcugaucuugcugggcc

SEQ ID NO: 537686 - RNA, 32 nt, Human
uucuucucccuguguccauguguucucauugu

SEQ ID NO: 537687 - RNA, 32 nt, Human
uucuucuccgguagccucucccaccuaaccuc

SEQ ID NO: 537688 - RNA, 32 nt, Human
uucuucuccuccuccuccuuccuuccuccucc

SEQ ID NO: 537689 - RNA, 32 nt, Human
uucuucuccugccucuagccucuccuggaaag

SEQ ID NO: 537690 - RNA, 32 nt, Human
uucuucuccuuucugcugaccagaaugugagc

SEQ ID NO: 537691 - RNA, 32 nt, Human
uucuucucuggcuuccucuccuucugguccua

SEQ ID NO: 537692 - RNA, 32 nt, Human
uucuucucuucccauucuuccuuacccugccu

SEQ ID NO: 537693 - RNA, 32 nt, Human
uucuucugauggcuauuccuccaccuuauucc

SEQ ID NO: 537694 - RNA, 31 nt, Human
uucuucugccucucuguguggguacugugug

SEQ ID NO: 537695 - RNA, 32 nt, Human
uucuucugccugcuaugacagcacuaaugauu

SEQ ID NO: 537696 - RNA, 32 nt, Human
uucuucugcggaaccuccaccccuccaguggg

SEQ ID NO: 537697 - RNA, 32 nt, Human
uucuucugcuuuguauaugaccuugaucuuuu

SEQ ID NO: 537698 - RNA, 32 nt, Human
uucuucugggagaacaguuggcagacagccac

SEQ ID NO: 537699 - RNA, 32 nt, Human
uucuucuggggccacccuccagccuggggcau

SEQ ID NO: 537700 - RNA, 32 nt, Human
uucuucugggucuaggccaugguacaggagaa

SEQ ID NO: 537701 - RNA, 32 nt, Human
uucuucuggugcuucucacuggacuugguggg

SEQ ID NO: 537702 - RNA, 32 nt, Human
uucuucugucaggggcacuuuccaggcuaugg

SEQ ID NO: 537703 - RNA, 32 nt, Human
uucuucugucguuucuguuccuccuccucucu

SEQ ID NO: 537704 - RNA, 32 nt, Human
uucuucugugacaauuuaucaguaucuuuacc

SEQ ID NO: 537705 - RNA, 32 nt, Human
uucuucugugcucuccucuggcuccccugucc

SEQ ID NO: 537706 - RNA, 32 nt, Human
uucuucuguugccuuuuucuuacagaaugacu

SEQ ID NO: 537707 - RNA, 32 nt, Human
uucuucuuauugcccaggcuugagugcaauga

SEQ ID NO: 537708 - RNA, 32 nt, Human
uucuucuucaaaccuuugugugcggagucauu

SEQ ID NO: 537709 - RNA, 32 nt, Human
uucuucuucacauccauugucucuucaugucu

SEQ ID NO: 537710 - RNA, 32 nt, Human
uucuucuuccacugcaaacuccuaugcagccg

SEQ ID NO: 537711 - RNA, 32 nt, Human
uucuucuuccuccaccacagaugaggacucuu

SEQ ID NO: 537712 - RNA, 32 nt, Human
uucuucuucgcuuccuccucucccaagcaaug

SEQ ID NO: 537713 - RNA, 32 nt, Human
uucuucuucuaagaagacauuuuguuacauaa

SEQ ID NO: 537714 - RNA, 32 nt, Human
uucuucuucuagaauccccacagggaaauacu

SEQ ID NO: 537715 - RNA, 32 nt, Human
uucuucuucuccccacucucccaggcaaccug

SEQ ID NO: 537716 - RNA, 32 nt, Human
uucuucuucucccuuuccaucuuucagcauag

SEQ ID NO: 537717 - RNA, 32 nt, Human
uucuucuucucugccucuccugccucucgccg

SEQ ID NO: 537718 - RNA, 32 nt, Human
uucuucuucucuucucugcaaugcuucuguag

SEQ ID NO: 537719 - RNA, 32 nt, Human
uucuucuucuucuacaacuggaaccagccauu

SEQ ID NO: 537720 - RNA, 32 nt, Human
uucuucuucuucuucuuccucuuccauaguug

SEQ ID NO: 537721 - RNA, 32 nt, Human
uucuucuucuucuucuucuucuucuucuuugg

SEQ ID NO: 537722 - RNA, 32 nt, Human
uucuucuucuucuucuucuucuucuuuggucc

SEQ ID NO: 537723 - RNA, 32 nt, Human
uucuucuucuucuucuucuucuuugguccuua

SEQ ID NO: 537724 - RNA, 32 nt, Human
uucuucuucuucuucuucuuugguccuuaagu

SEQ ID NO: 537725 - RNA, 32 nt, Human
uucuucuucuucuucuuugguccuuaagugaa

SEQ ID NO: 537726 - RNA, 32 nt, Human
uucuucuucuucuucuuuugugguuucacaua

SEQ ID NO: 537727 - RNA, 32 nt, Human
uucuucuucuucuuugguccuuaagugaaaua

SEQ ID NO: 537728 - RNA, 32 nt, Human
uucuucuucuucuuuugugguuucacauagca

SEQ ID NO: 537729 - RNA, 32 nt, Human
uucuucuugcagaaugugcucugguggaacaa

SEQ ID NO: 537730 - RNA, 32 nt, Human
uucuucuuggcucaccaacccugcaggccuca

SEQ ID NO: 537731 - RNA, 32 nt, Human
uucuucuuggcugguucuuuguucuguccccc

SEQ ID NO: 537732 - RNA, 32 nt, Human
uucuucuuguagcucuguguaagcagguggau

SEQ ID NO: 537733 - RNA, 32 nt, Human
uucuucuugugucuuugguggggauggggagg

SEQ ID NO: 537734 - RNA, 32 nt, Human
uucuucuuucuuucuuuugcaggaguuugugg

SEQ ID NO: 537735 - RNA, 32 nt, Human
uucuucuuuguaucucccuccuucccagccca

SEQ ID NO: 537736 - RNA, 32 nt, Human
uucuucuuuguuguucuucuagugugacuuuu

SEQ ID NO: 537737 - RNA, 32 nt, Human
uucuucuuuuugaguuccgcaacuugcuccug

SEQ ID NO: 537738 - RNA, 32 nt, Human
uucuugaaaaagaagaaaccugaagaugccuu

SEQ ID NO: 537739 - RNA, 32 nt, Human
uucuugaaagacagcuggcuguggagagccuu

SEQ ID NO: 537740 - RNA, 32 nt, Human
uucuugaacuccuggccaacauggugaaaccc

SEQ ID NO: 537741 - RNA, 32 nt, Human
uucuugaagaaagaagaagaugccacugccau

SEQ ID NO: 537742 - RNA, 32 nt, Human
uucuugaagcagcuccugcaaaagggaugcaa

SEQ ID NO: 537743 - RNA, 32 nt, Human
uucuugaagcugggcugucucucuccauguug

SEQ ID NO: 537744 - RNA, 32 nt, Human
uucuugaauguaaaagauagucuuccaaagga

SEQ ID NO: 537745 - RNA, 23 nt, Human
uucuugaauuauaucugcauuua

SEQ ID NO: 537746 - RNA, 32 nt, Human
uucuugacaauggggucaggccccagaggagc

SEQ ID NO: 537747 - RNA, 32 nt, Human
uucuugaccagaaccugcugugcgcuucacag

SEQ ID NO: 537748 - RNA, 32 nt, Human
uucuugaccugaggggugauuucuuggguaug

SEQ ID NO: 537749 - RNA, 32 nt, Human
uucuugacuaaaaggccagcuggcaccucugu

SEQ ID NO: 537750 - RNA, 32 nt, Human
uucuugacucacuaucacuuuaccucaaauug

SEQ ID NO: 537751 - RNA, 32 nt, Human
uucuugacucuugguucccuguuaacucuguu

SEQ ID NO: 537752 - RNA, 21 nt, Human
uucuugacugaaggugagaug

SEQ ID NO: 537753 - RNA, 24 nt, Human
uucuugagaauaaagccacugggc

SEQ ID NO: 537754 - RNA, 32 nt, Human
uucuugagaauaagcaaugggucagaugaaau

SEQ ID NO: 537755 - RNA, 32 nt, Human
uucuugagacuacccucggccuccaggucuuu

SEQ ID NO: 537756 - RNA, 32 nt, Human
uucuugagacugagucucucccuguugcccaa

SEQ ID NO: 537757 - RNA, 32 nt, Human
uucuugagagaaggagaggaagauacagcaga

SEQ ID NO: 537758 - RNA, 32 nt, Human
uucuugagaggaaguuauagaaggcuuguugg

SEQ ID NO: 537759 - RNA, 32 nt, Human
uucuugagauggagucucucugcacuccagcc

SEQ ID NO: 537760 - RNA, 32 nt, Human
uucuugagauucuaagucccacaaacauuuac

SEQ ID NO: 537761 - RNA, 32 nt, Human
uucuugagcuaaagacaggcuuuuuccaccgg

SEQ ID NO: 537762 - RNA, 32 nt, Human
uucuugagguacucugcacauacgcaccacau

SEQ ID NO: 537763 - RNA, 32 nt, Human
uucuugagguaguuaaggauuaaaaccagaaa

SEQ ID NO: 537764 - RNA, 32 nt, Human
uucuugaggucucuuuucucugcuccaugguu

SEQ ID NO: 537765 - RNA, 32 nt, Human
uucuugaggucuugagggaauagugaaacaca

SEQ ID NO: 537766 - RNA, 32 nt, Human
uucuugagucccugagaaugccuagcaaaguc

SEQ ID NO: 537767 - RNA, 24 nt, Human
uucuugauuagcuuugugauguaa

SEQ ID NO: 537768 - RNA, 32 nt, Human
uucuugauucauccauggacccugcacgaaau

SEQ ID NO: 537769 - RNA, 31 nt, Human
uucuugcacagcuaauagaagacaaaguuga

SEQ ID NO: 537770 - RNA, 32 nt, Human
uucuugcaccucagcagcugaaggucucagag

SEQ ID NO: 537771 - RNA, 32 nt, Human
uucuugcacgcgcucccugccugggcacacca

SEQ ID NO: 537772 - RNA, 32 nt, Human
uucuugcagcuaagcaagacagccauaugaug

SEQ ID NO: 537773 - RNA, 32 nt, Human
uucuugcaguguuguugcaaaugcagagcuau

SEQ ID NO: 537774 - RNA, 32 nt, Human
uucuugcaucuggccuuagaaaugugaaguua

SEQ ID NO: 537775 - RNA, 32 nt, Human
uucuugcauggcccaagauguauuucccugug

SEQ ID NO: 537776 - RNA, 32 nt, Human
uucuugccaauuucacacuuguaucuucagca

SEQ ID NO: 537777 - RNA, 32 nt, Human
uucuugccacaucuucucagaagacuuucagg

SEQ ID NO: 537778 - RNA, 32 nt, Human
uucuugccaccugcaaccccaaucucaauccg

SEQ ID NO: 537779 - RNA, 32 nt, Human
uucuugccaggaggaggaaugagagugauguu

SEQ ID NO: 537780 - RNA, 32 nt, Human
uucuugccaucagaagggacagaaggagaugg

SEQ ID NO: 537781 - RNA, 32 nt, Human
uucuugccaucguagagcacaccagaagcagg

SEQ ID NO: 537782 - RNA, 32 nt, Human
uucuugcccaggcagagagagcaggagcggac

SEQ ID NO: 537783 - RNA, 32 nt, Human
uucuugcccaggcuggaguacaauggugcgau

SEQ ID NO: 537784 - RNA, 32 nt, Human
uucuugcccaggcuggagugcaagggcgcaau

SEQ ID NO: 537785 - RNA, 32 nt, Human
uucuugcccucucuuuugaggcucucucauaa

SEQ ID NO: 537786 - RNA, 32 nt, Human
uucuugcccuuuucagcagcuugcccagcucu

SEQ ID NO: 537787 - RNA, 32 nt, Human
uucuugccguggcucuuccuccucccucagcg

SEQ ID NO: 537788 - RNA, 32 nt, Human
uucuugccuaguguccagagcagcagagauuu

SEQ ID NO: 537789 - RNA, 32 nt, Human
uucuugccucaccauuccccuaggcaggcccu

SEQ ID NO: 537790 - RNA, 32 nt, Human
uucuugccucccugaccagcagacucaccucc

SEQ ID NO: 537791 - RNA, 32 nt, Human
uucuugccuguaacccuagcacuuugggaggc

SEQ ID NO: 537792 - RNA, 32 nt, Human
uucuugccuucaugcuuggcccucucuccuca

SEQ ID NO: 537793 - RNA, 32 nt, Human
uucuugcuauauugccccaggcuggucucgaa

SEQ ID NO: 537794 - RNA, 32 nt, Human
uucuugcucacugcucacccaccugcugcugc

SEQ ID NO: 537795 - RNA, 32 nt, Human
uucuugcucauaugcagaaaagugagaugggg

SEQ ID NO: 537796 - RNA, 32 nt, Human
uucuugcucaucccuucucccuuucacuucug

SEQ ID NO: 537797 - RNA, 32 nt, Human
uucuugcuccaaucccuaccaauaaugucaug

SEQ ID NO: 537798 - RNA, 32 nt, Human
uucuugcuccuguucucagccuguuaucuggc

SEQ ID NO: 537799 - RNA, 32 nt, Human
uucuugcuccuucuucaacuccuggugugugu

SEQ ID NO: 537800 - RNA, 32 nt, Human
uucuugcucucccaggcuggagugcaguggug

SEQ ID NO: 537801 - RNA, 32 nt, Human
uucuugcugcagccugcuccagccuggccccc

SEQ ID NO: 537802 - RNA, 32 nt, Human
uucuugcugcugcugccugccugcccacccgc

SEQ ID NO: 537803 - RNA, 21 nt, Human
uucuugcugcugugacugcaa

SEQ ID NO: 537804 - RNA, 32 nt, Human
uucuugcuggaugacccacuguccgcggugga

SEQ ID NO: 537805 - RNA, 32 nt, Human
uucuugcuucaguuggggcagacucugauccc

SEQ ID NO: 537806 - RNA, 31 nt, Human
uucuugcuuucaauaucuuguugaaauaaaa

SEQ ID NO: 537807 - RNA, 32 nt, Human
uucuugcuuuccuggggagggagggagggaug

SEQ ID NO: 537808 - RNA, 32 nt, Human
uucuugcuuuggcugagagcagccucuuuuua

SEQ ID NO: 537809 - RNA, 32 nt, Human
uucuugcuuuuccuucucauugcccuuuucag

SEQ ID NO: 537810 - RNA, 31 nt, Human
uucuugcuuuucugugggccugaagguccga

SEQ ID NO: 537811 - RNA, 32 nt, Human
uucuuggaaaaacacagacagcaauggaucaa

SEQ ID NO: 537812 - RNA, 32 nt, Human
uucuuggaaauaucucaaauguuaauaacaau

SEQ ID NO: 537813 - RNA, 32 nt, Human
uucuuggacagaaaccauccaugaauuuagca

SEQ ID NO: 537814 - RNA, 32 nt, Human
uucuuggagaacacuggacagcugaauaaaug

SEQ ID NO: 537815 - RNA, 32 nt, Human
uucuuggagccucacugucuucaucuguuaag

SEQ ID NO: 537816 - RNA, 32 nt, Human
uucuuggaggaggugggacuugagcuggaccc

SEQ ID NO: 537817 - RNA, 32 nt, Human
uucuuggaggcgacaacccccgggaggcauua

SEQ ID NO: 537818 - RNA, 32 nt, Human
uucuuggagguagaagucgaguaugaggcagu

SEQ ID NO: 537819 - RNA, 32 nt, Human
uucuuggaugcaucuucuuccuucccuuuccu

SEQ ID NO: 537820 - RNA, 32 nt, Human
uucuuggcacaucuguaaugagaacuugucug

SEQ ID NO: 537821 - RNA, 32 nt, Human
uucuuggcagagagaagaggggacaaauuugg

SEQ ID NO: 537822 - RNA, 32 nt, Human
uucuuggcaggagagcccucagcuggagaagc

SEQ ID NO: 537823 - RNA, 32 nt, Human
uucuuggccaagcagaugacaacacaucuccu

SEQ ID NO: 537824 - RNA, 32 nt, Human
uucuuggccaggcuguaggugguggcucacau

SEQ ID NO: 537825 - RNA, 32 nt, Human
uucuuggccaugacaggacaggaagucagaca

SEQ ID NO: 537826 - RNA, 32 nt, Human
uucuuggcccuccucugcuccuccccacaccc

SEQ ID NO: 537827 - RNA, 32 nt, Human
uucuuggccucugcucagcuacucuggucuug

SEQ ID NO: 537828 - RNA, 32 nt, Human
uucuuggcucacugcacccuccgccuccuggg

SEQ ID NO: 537829 - RNA, 19 nt, Human
uucuuggcucaucugguca

SEQ ID NO: 537830 - RNA, 32 nt, Human
uucuuggcuccuuuucuccauuuccuuugggg

SEQ ID NO: 537831 - RNA, 28 nt, Human
uucuuggcucggcggcgcucggggccug

SEQ ID NO: 537832 - RNA, 32 nt, Human
uucuuggcuugucugcaguauauacauuuaau

SEQ ID NO: 537833 - RNA, 32 nt, Human
uucuugggaauuuugcuuuuugucuucccuuc

SEQ ID NO: 537834 - RNA, 32 nt, Human
uucuugggacccuccucucucccucacugcuc

SEQ ID NO: 537835 - RNA, 32 nt, Human
uucuugggagagaggggaagagucgggacuug

SEQ ID NO: 537836 - RNA, 32 nt, Human
uucuugggagccaagagaaugcaagauccugg

SEQ ID NO: 537837 - RNA, 32 nt, Human
uucuugggcagcagggaggcagcucuggaggg

SEQ ID NO: 537838 - RNA, 32 nt, Human
uucuugggccaucugaggguuccugagcccaa

SEQ ID NO: 537839 - RNA, 32 nt, Human
uucuugggccccacuccagggugucgcggggg

SEQ ID NO: 537840 - RNA, 32 nt, Human
uucuugggccgcgcucccucccuaccugggug

SEQ ID NO: 537841 - RNA, 22 nt, Human
uucuugggccucugggcacaga

SEQ ID NO: 537842 - RNA, 32 nt, Human
uucuugggccuggagguuagcagucaaguuuc

SEQ ID NO: 537843 - RNA, 32 nt, Human
uucuugggcugccaaauuucagcuaagcauca

SEQ ID NO: 537844 - RNA, 32 nt, Human
uucuugggguagagcgugaaauccagaccugu

SEQ ID NO: 537845 - RNA, 32 nt, Human
uucuuggguauuggggacaggacagagagcuc

SEQ ID NO: 537846 - RNA, 32 nt, Human
uucuuggguguuuauccuaucucuccaaccag

SEQ ID NO: 537847 - RNA, 23 nt, Human
uucuugguacugggaggcugcag

SEQ ID NO: 537848 - RNA, 24 nt, Human
uucuugguaguaagauaacuguag

SEQ ID NO: 537849 - RNA, 23 nt, Human
uucuuggucagagguagcugcag

SEQ ID NO: 537850 - RNA, 22 nt, Human
uucuuggucuuuugugacgcag

SEQ ID NO: 537851 - RNA, 32 nt, Human
uucuuggugaguuauugugggaaaaauccugu

SEQ ID NO: 537852 - RNA, 32 nt, Human
uucuuggugccaucuuccccugccgcaccggc

SEQ ID NO: 537853 - RNA, 32 nt, Human
uucuuggugccuuauugguuuuccuugcaaac

SEQ ID NO: 537854 - RNA, 32 nt, Human
uucuuggugggaacaugaaugagaaaugaugc

SEQ ID NO: 537855 - RNA, 32 nt, Human
uucuugguguuaucuuuucucagaauaaaauu

SEQ ID NO: 537856 - RNA, 24 nt, Human
uucuugguguuguuguaacuggag

SEQ ID NO: 537857 - RNA, 32 nt, Human
uucuugguuuaugucuuguucuugagauuuug

SEQ ID NO: 537858 - RNA, 32 nt, Human
uucuugguuugcuccuuggauuccccuuccca

SEQ ID NO: 537859 - RNA, 32 nt, Human
uucuuguaccccuuugcaguucaucagccuuu

SEQ ID NO: 537860 - RNA, 32 nt, Human
uucuuguaccccuuugcaguucaucagucuuu

SEQ ID NO: 537861 - RNA, 32 nt, Human
uucuuguagggagaaaugagaaaucgcauuug

SEQ ID NO: 537862 - RNA, 32 nt, Human
uucuuguagugccagucuaaugguuaugaauu

SEQ ID NO: 537863 - RNA, 32 nt, Human
uucuuguauacuuagcuuacugcccagaugca

SEQ ID NO: 537864 - RNA, 31 nt, Human
uucuuguaucugcugcugccuguguuuuucu

SEQ ID NO: 537865 - RNA, 32 nt, Human
uucuugucacccagacuggagugcgauggcac

SEQ ID NO: 537866 - RNA, 32 nt, Human
uucuugucacccugggacaguaaugccuuaua

SEQ ID NO: 537867 - RNA, 32 nt, Human
uucuugucccccaggcuugagugcaaugacuc

SEQ ID NO: 537868 - RNA, 32 nt, Human
uucuuguccuggggcccccuugagcugugaac

SEQ ID NO: 537869 - RNA, 32 nt, Human
uucuugucuccucuaauaagccccacccuccc

SEQ ID NO: 537870 - RNA, 32 nt, Human
uucuugucuccucuucagaauuagccauuuaa

SEQ ID NO: 537871 - RNA, 32 nt, Human
uucuugucuuggcacaugcacagacccagucc

SEQ ID NO: 537872 - RNA, 32 nt, Human
uucuugugcuaaaucucucucacagucccccu

SEQ ID NO: 537873 - RNA, 32 nt, Human
uucuuguggaccugucuguuacggagucacac

SEQ ID NO: 537874 - RNA, 32 nt, Human
uucuugugugccucccuuuccuuucccuccca

SEQ ID NO: 537875 - RNA, 32 nt, Human
uucuugugugucccucggguuuggggcucuuc

SEQ ID NO: 537876 - RNA, 32 nt, Human
uucuuguucaggacugacacagccacaguuuc

SEQ ID NO: 537877 - RNA, 32 nt, Human
uucuuguucauuuugcauuccugcagucagug

SEQ ID NO: 537878 - RNA, 32 nt, Human
uucuuguucuuucugacucaggugacuuuuca

SEQ ID NO: 537879 - RNA, 32 nt, Human
uucuuguucuuugcaccucucucuccaccccu

SEQ ID NO: 537880 - RNA, 32 nt, Human
uucuuguugcccaaccuggagugcaguggugc

SEQ ID NO: 537881 - RNA, 32 nt, Human
uucuuguugcccaggcugcagugcaauggcac

SEQ ID NO: 537882 - RNA, 32 nt, Human
uucuuguugcccaggcuggaaugcaauggcgc

SEQ ID NO: 537883 - RNA, 32 nt, Human
uucuuguugcccagggcuggagugcaguggca

SEQ ID NO: 537884 - RNA, 32 nt, Human
uucuuguugccgaggcuggagugcaauggcgc

SEQ ID NO: 537885 - RNA, 32 nt, Human
uucuuguugccuaggcuggagugcaauggcga

SEQ ID NO: 537886 - RNA, 32 nt, Human
uucuuguuucuccaauuuucaaggaaauaaac

SEQ ID NO: 537887 - RNA, 32 nt, Human
uucuuuaaaauuggauugucuggugaguuuug

SEQ ID NO: 537888 - RNA, 32 nt, Human
uucuuuaaacauggagucuaaauauguaauau

SEQ ID NO: 537889 - RNA, 32 nt, Human
uucuuuaaagaaugcuggguguugcauuucug

SEQ ID NO: 537890 - RNA, 32 nt, Human
uucuuuaaaguuaggaaagggaguaggcaggc

SEQ ID NO: 537891 - RNA, 32 nt, Human
uucuuuaaccacacucuaaaaguucuucagac

SEQ ID NO: 537892 - RNA, 32 nt, Human
uucuuuaaccuccuaaauauuggugggaagac

SEQ ID NO: 537893 - RNA, 32 nt, Human
uucuuuaagugcugggaguauuaccauaauaa

SEQ ID NO: 537894 - RNA, 32 nt, Human
uucuuuaaucuaguaugguuacuccagauaag

SEQ ID NO: 537895 - RNA, 32 nt, Human
uucuuuaaucucuguuuucacucucaggcucu

SEQ ID NO: 537896 - RNA, 32 nt, Human
uucuuuaaugaaauccuccucacuuccaucac

SEQ ID NO: 537897 - RNA, 21 nt, Human
uucuuuacaaaggaaaauggc

SEQ ID NO: 537898 - RNA, 32 nt, Human
uucuuuacagauuccagcaagauuauggaaga

SEQ ID NO: 537899 - RNA, 32 nt, Human
uucuuuaccucauuaucaccuuccccucacac

SEQ ID NO: 537900 - RNA, 32 nt, Human
uucuuuacuauuuaaaauacuacacauuguac

SEQ ID NO: 537901 - RNA, 32 nt, Human
uucuuuacugacuugauucagucacucguagc

SEQ ID NO: 537902 - RNA, 32 nt, Human
uucuuuagagagaagcggggaguggguuaacu

SEQ ID NO: 537903 - RNA, 32 nt, Human
uucuuuagagagcagaagcagaagaguaaaau

SEQ ID NO: 537904 - RNA, 32 nt, Human
uucuuuagagcauuugcuucacacacaguuca

SEQ ID NO: 537905 - RNA, 32 nt, Human
uucuuuagauggagucucacucugucacccag

SEQ ID NO: 537906 - RNA, 32 nt, Human
uucuuuagaugguggcacauuccuuuggguau

SEQ ID NO: 537907 - RNA, 32 nt, Human
uucuuuaggaagagccagacugccugugaagg

SEQ ID NO: 537908 - RNA, 32 nt, Human
uucuuuaggcaucacacacagccccggcacac

SEQ ID NO: 537909 - RNA, 32 nt, Human
uucuuuagggagugcuucuggggaacccauug

SEQ ID NO: 537910 - RNA, 21 nt, Human
uucuuuaggguccagaaggaa

SEQ ID NO: 537911 - RNA, 32 nt, Human
uucuuuagguauaagaaaaagaugaaugauga

SEQ ID NO: 537912 - RNA, 32 nt, Human
uucuuuaguaaagacaggguuucuccauguug

SEQ ID NO: 537913 - RNA, 32 nt, Human
uucuuuaucuucuaugaagggucuguaaugaa

SEQ ID NO: 537914 - RNA, 32 nt, Human
uucuuuauguacaaagauuauuugcacgaacu

SEQ ID NO: 537915 - RNA, 32 nt, Human
uucuuuauguauauuuguagcuauauuucaua

SEQ ID NO: 537916 - RNA, 32 nt, Human
uucuuuauguguuucauuacagcuccaaaaag

SEQ ID NO: 537917 - RNA, 32 nt, Human
uucuuuauucagauaagaucucagccaaaagg

SEQ ID NO: 537918 - RNA, 32 nt, Human
uucuuuauuccucuuucuucugaagauuaaug

SEQ ID NO: 537919 - RNA, 32 nt, Human
uucuuuauuccuucuuuucucccaacuacugu

SEQ ID NO: 537920 - RNA, 31 nt, Human
uucuuuauucugugacaccuguugaaugagg

SEQ ID NO: 537921 - RNA, 32 nt, Human
uucuuuauuuauaacaugaagcacaauggauu

SEQ ID NO: 537922 - RNA, 32 nt, Human
uucuuuauuucaucuucccuauuccaucuaau

SEQ ID NO: 537923 - RNA, 29 nt, Human
uucuuuauuuugugugugccugugauguu

SEQ ID NO: 537924 - RNA, 32 nt, Human
uucuuucaaauugugugugcucugcuucaaug

SEQ ID NO: 537925 - RNA, 32 nt, Human
uucuuucaaucaucaucucucuaaaaaggccc

SEQ ID NO: 537926 - RNA, 32 nt, Human
uucuuucaccuuugaaacaaugguuuguagca

SEQ ID NO: 537927 - RNA, 32 nt, Human
uucuuucacugacacccaccucuaaggacuca

SEQ ID NO: 537928 - RNA, 32 nt, Human
uucuuucacugugcuacuaugugguuuuuaaa

SEQ ID NO: 537929 - RNA, 32 nt, Human
uucuuucagcuuuacagaacuguauuauaagu

SEQ ID NO: 537930 - RNA, 32 nt, Human
uucuuucauacuggcuaucauggcuuccacug

SEQ ID NO: 537931 - RNA, 32 nt, Human
uucuuuccacacucagcucucccuccucaacc

SEQ ID NO: 537932 - RNA, 32 nt, Human
uucuuuccacgcuuuccagccugugggagcgg

SEQ ID NO: 537933 - RNA, 32 nt, Human
uucuuuccacuccuauuacaacugaucugauu

SEQ ID NO: 537934 - RNA, 32 nt, Human
uucuuuccagaagaggagacaaaagcaagaua

SEQ ID NO: 537935 - RNA, 32 nt, Human
uucuuuccagaccugcuccugcugcacagagc

SEQ ID NO: 537936 - RNA, 32 nt, Human
uucuuuccaggccuuucccaaggaguagcuga

SEQ ID NO: 537937 - RNA, 32 nt, Human
uucuuuccaucuuuagaaacaucaguuuuugu

SEQ ID NO: 537938 - RNA, 32 nt, Human
uucuuuccauuggaaacaguugcuugaaguag

SEQ ID NO: 537939 - RNA, 32 nt, Human
uucuuuccauuuuucuucugggaaaauagcag

SEQ ID NO: 537940 - RNA, 19 nt, Human
uucuuucccaggcaccaca

SEQ ID NO: 537941 - RNA, 32 nt, Human
uucuuucccauguuguauugcauuuuuggggg

SEQ ID NO: 537942 - RNA, 32 nt, Human
uucuuucccuuucccuuucuuuucuuucuuua

SEQ ID NO: 537943 - RNA, 32 nt, Human
uucuuucccuuucucuuucuaucucucuuuau

SEQ ID NO: 537944 - RNA, 32 nt, Human
uucuuuccuagccugaguguugagcaguguca

SEQ ID NO: 537945 - RNA, 32 nt, Human
uucuuuccucaaggagacuccagcaccuaugc

SEQ ID NO: 537946 - RNA, 32 nt, Human
uucuuuccucaccccaaccuuuacuccaccag

SEQ ID NO: 537947 - RNA, 32 nt, Human
uucuuuccuccacaucuucccucaagcugcuc

SEQ ID NO: 537948 - RNA, 32 nt, Human
uucuuuccuccaccccuccaucccccaaugcu

SEQ ID NO: 537949 - RNA, 32 nt, Human
uucuuuccucuccaaagccucagucuagccug

SEQ ID NO: 537950 - RNA, 32 nt, Human
uucuuuccucuuuccccugccugugugcccuu

SEQ ID NO: 537951 - RNA, 32 nt, Human
uucuuuccuggguuuugguguugugggauccc

SEQ ID NO: 537952 - RNA, 32 nt, Human
uucuuuccuuccugccuuuuagcucuaaccac

SEQ ID NO: 537953 - RNA, 32 nt, Human
uucuuuccuucuucccucccugccucccuuuc

SEQ ID NO: 537954 - RNA, 32 nt, Human
uucuuucguuugcccuucuuccuuccuguguu

SEQ ID NO: 537955 - RNA, 32 nt, Human
uucuuucuaacuacaugcaucucuccacucaa

SEQ ID NO: 537956 - RNA, 32 nt, Human
uucuuucuacucucuucucuuccccaaggccu

SEQ ID NO: 537957 - RNA, 32 nt, Human
uucuuucuauucagcuucuaagugggcuauuc

SEQ ID NO: 537958 - RNA, 32 nt, Human
uucuuucucacccaggcaaucuugccuucugg

SEQ ID NO: 537959 - RNA, 32 nt, Human
uucuuucuccacccacucaguugucuagaaga

SEQ ID NO: 537960 - RNA, 32 nt, Human
uucuuucuccuccagcugaaucagcuggaucc

SEQ ID NO: 537961 - RNA, 32 nt, Human
uucuuucucuauaacuaacacagggaucacug

SEQ ID NO: 537962 - RNA, 32 nt, Human
uucuuucucuccccguuucucuccccaucuug

SEQ ID NO: 537963 - RNA, 32 nt, Human
uucuuucucucccucccuccuuaugugccaag

SEQ ID NO: 537964 - RNA, 32 nt, Human
uucuuucugcaaccuguacuuacagauucuuc

SEQ ID NO: 537965 - RNA, 32 nt, Human
uucuuucugcucccucauucucuccccaccac

SEQ ID NO: 537966 - RNA, 32 nt, Human
uucuuucugcuuuccaagacuccaggaaaaac

SEQ ID NO: 537967 - RNA, 32 nt, Human
uucuuucuguaggaaaaguucugugaggaugg

SEQ ID NO: 537968 - RNA, 24 nt, Human
uucuuucuguccauaacugaagua

SEQ ID NO: 537969 - RNA, 32 nt, Human
uucuuucuguguuucacauucauagcaacugc

SEQ ID NO: 537970 - RNA, 32 nt, Human
uucuuucuguuuucuuuuacucugcuuacauu

SEQ ID NO: 537971 - RNA, 32 nt, Human
uucuuucuuaccuucucuccucuugucauuca

SEQ ID NO: 537972 - RNA, 32 nt, Human
uucuuucuuauuguggagcguccccuuccauc

SEQ ID NO: 537973 - RNA, 32 nt, Human
uucuuucuucacucugaaguagcuggugguac

SEQ ID NO: 537974 - RNA, 32 nt, Human
uucuuucuucuggcuuuggaaaaaucucauga

SEQ ID NO: 537975 - RNA, 32 nt, Human
uucuuucuucuucucuccuuuuccuaucaucc

SEQ ID NO: 537976 - RNA, 32 nt, Human
uucuuucuucuuuucucucccuuccuucuucc

SEQ ID NO: 537977 - RNA, 32 nt, Human
uucuuucuuucagccugaauucuaagcaacaa

SEQ ID NO: 537978 - RNA, 32 nt, Human
uucuuucuuucauuccuuccuuccucuguuuc

SEQ ID NO: 537979 - RNA, 32 nt, Human
uucuuucuuucuccuuccuuccuuccucuuuc

SEQ ID NO: 537980 - RNA, 32 nt, Human
uucuuucuuuuccugguagauaggaucuuuuc

SEQ ID NO: 537981 - RNA, 32 nt, Human
uucuuucuuuucuauuucuccgugucagaaug

SEQ ID NO: 537982 - RNA, 32 nt, Human
uucuuugaacccaggaggcagagguugcagug

SEQ ID NO: 537983 - RNA, 32 nt, Human
uucuuugaagauugggaaggcucagaagggca

SEQ ID NO: 537984 - RNA, 18 nt, Human
uucuuugaaucuuccuua

SEQ ID NO: 537985 - RNA, 32 nt, Human
uucuuugaccggcuugucauccuuacgccacu

SEQ ID NO: 537986 - RNA, 32 nt, Human
uucuuugacuccaagccuuaaaauacucacau

SEQ ID NO: 537987 - RNA, 32 nt, Human
uucuuugacuccuguggcccucgcugcuuuac

SEQ ID NO: 537988 - RNA, 32 nt, Human
uucuuugagaaacccuaacacuggcuucauuu

SEQ ID NO: 537989 - RNA, 32 nt, Human
uucuuugagacaaggcaggcuguggccaugua

SEQ ID NO: 537990 - RNA, 32 nt, Human
uucuuugagacuauuuaaaaacugguacaaca

SEQ ID NO: 537991 - RNA, 32 nt, Human
uucuuugagaugaagucucccucuuguuaccc

SEQ ID NO: 537992 - RNA, 32 nt, Human
uucuuugagauggagucucgcucugucaccca

SEQ ID NO: 537993 - RNA, 32 nt, Human
uucuuugagauggagucuugcucugucaccca

SEQ ID NO: 537994 - RNA, 32 nt, Human
uucuuugaugccacuggccacuguaucugcuu

SEQ ID NO: 537995 - RNA, 32 nt, Human
uucuuugcaggaggagaagagaaggggugcaa

SEQ ID NO: 537996 - RNA, 32 nt, Human
uucuuugcccagaguugcaguuguacuguugc

SEQ ID NO: 537997 - RNA, 32 nt, Human
uucuuugccugagauccuuccugaggagcguc

SEQ ID NO: 537998 - RNA, 32 nt, Human
uucuuugccuugagccucaucacucagaagcc

SEQ ID NO: 537999 - RNA, 32 nt, Human
uucuuugcuauccucugccuucccaagucccu

SEQ ID NO: 538000 - RNA, 32 nt, Human
uucuuugcuccucucugcuccaauaccaccac

SEQ ID NO: 538001 - RNA, 32 nt, Human
uucuuuggagaacagaaagaagaaaggaaaga

SEQ ID NO: 538002 - RNA, 32 nt, Human
uucuuuggaggaagauuggaggcuggugcuca

SEQ ID NO: 538003 - RNA, 32 nt, Human
uucuuuggaucccagagggccuugauccuggg

SEQ ID NO: 538004 - RNA, 32 nt, Human
uucuuuggcaauagcccagucuggacuuacua

SEQ ID NO: 538005 - RNA, 32 nt, Human
uucuuuggcugcagaguggccuggccaacuca

SEQ ID NO: 538006 - RNA, 23 nt, Human
uucuuuggggauggggagcucuu

SEQ ID NO: 538007 - RNA, 32 nt, Human
uucuuuggggcucucggcugggcgcaguggcu

SEQ ID NO: 538008 - RNA, 32 nt, Human
uucuuuggggguggaaaaggaaaacaauucaa

SEQ ID NO: 538009 - RNA, 32 nt, Human
uucuuugggguuuuuguuuguuuucccccauu

SEQ ID NO: 538010 - RNA, 32 nt, Human
uucuuugguacacaguucugguguuccuacca

SEQ ID NO: 538011 - RNA, 32 nt, Human
uucuuugguacuugcuuauaaagugauaguac

SEQ ID NO: 538012 - RNA, 32 nt, Human
uucuuugguagaaauagcuuuugcuuuauauu

SEQ ID NO: 538013 - RNA, 32 nt, Human
uucuuugguuugcuuucuucaggcucuagggc

SEQ ID NO: 538014 - RNA, 32 nt, Human
uucuuugguuuugguuuguaagauccaucaaa

SEQ ID NO: 538015 - RNA, 32 nt, Human
uucuuuguaaagcauccucuaccucucagcug

SEQ ID NO: 538016 - RNA, 32 nt, Human
uucuuuguaccucccuccucucccucacucau

SEQ ID NO: 538017 - RNA, 32 nt, Human
uucuuuguaggcgccaucagccacuuuuagaa

SEQ ID NO: 538018 - RNA, 32 nt, Human
uucuuuguauaacuuuuccaagcuuuuacauu

SEQ ID NO: 538019 - RNA, 32 nt, Human
uucuuuguauuuuuaucucuaucuccucacuu

SEQ ID NO: 538020 - RNA, 32 nt, Human
uucuuugucaacuuaauuguuauggauguuug

SEQ ID NO: 538021 - RNA, 32 nt, Human
uucuuugucccaggauucauggacgcuucggg

SEQ ID NO: 538022 - RNA, 32 nt, Human
uucuuugucuuaucuggggaaggaaaguauaa

SEQ ID NO: 538023 - RNA, 32 nt, Human
uucuuugugcuucucauuuuuccuuuguugau

SEQ ID NO: 538024 - RNA, 32 nt, Human
uucuuuguggagccucucagugugggcagccc

SEQ ID NO: 538025 - RNA, 32 nt, Human
uucuuuguucaccucuacuugccucuaaaaua

SEQ ID NO: 538026 - RNA, 32 nt, Human
uucuuuguugacugaaaaagcgagaaagguga

SEQ ID NO: 538027 - RNA, 32 nt, Human
uucuuuguuuucuuccuuuaucguuuuuaggu

SEQ ID NO: 538028 - RNA, 32 nt, Human
uucuuuuaacaauuugaccucucuccaaaaca

SEQ ID NO: 538029 - RNA, 32 nt, Human
uucuuuuaagcaaugaggaaagagaugacuuu

SEQ ID NO: 538030 - RNA, 30 nt, Human
uucuuuuaauaaacacacuuacaugguuac

SEQ ID NO: 538031 - RNA, 32 nt, Human
uucuuuuaaugccaccacacguguuccgcuuc

SEQ ID NO: 538032 - RNA, 32 nt, Human
uucuuuuaauuagcugggcaugguggugugcu

SEQ ID NO: 538033 - RNA, 32 nt, Human
uucuuuuaauuccccaugauguuuucaauuau

SEQ ID NO: 538034 - RNA, 32 nt, Human
uucuuuuagaagcacaugucugccaaggagug

SEQ ID NO: 538035 - RNA, 32 nt, Human
uucuuuuagagaaaccaccuuaucuauuuuua

SEQ ID NO: 538036 - RNA, 32 nt, Human
uucuuuuagcuuggaaacagucuuccacuaac

SEQ ID NO: 538037 - RNA, 22 nt, Human
uucuuuuagguugggcgguggg

SEQ ID NO: 538038 - RNA, 32 nt, Human
uucuuuuauccuuacgcugucaaaaccucuaa

SEQ ID NO: 538039 - RNA, 32 nt, Human
uucuuuuauguucacaccaccacauucccauu

SEQ ID NO: 538040 - RNA, 32 nt, Human
uucuuuuauuaugagcugcuuguuugaguggu

SEQ ID NO: 538041 - RNA, 32 nt, Human
uucuuuuauuccuucuuuacugcuuuuucauc

SEQ ID NO: 538042 - RNA, 32 nt, Human
uucuuuuauuuuccuacaauguaagcacgguu

SEQ ID NO: 538043 - RNA, 22 nt, Human
uucuuuucaauuguuugauuca

SEQ ID NO: 538044 - RNA, 32 nt, Human
uucuuuucacacaaucucuuuacagcagaauc

SEQ ID NO: 538045 - RNA, 32 nt, Human
uucuuuucacuuccucuccacaggagccucug

SEQ ID NO: 538046 - RNA, 32 nt, Human
uucuuuucagaaccccagaugagagccaaugu

SEQ ID NO: 538047 - RNA, 32 nt, Human
uucuuuucaggucauuuacaauugggagauuu

SEQ ID NO: 538048 - RNA, 32 nt, Human
uucuuuucauuugagcucugguuucgguaggg

SEQ ID NO: 538049 - RNA, 21 nt, Human
uucuuuuccaaaaauacuucu

SEQ ID NO: 538050 - RNA, 32 nt, Human
uucuuuuccaaaauaaaacaaagggcacagca

SEQ ID NO: 538051 - RNA, 32 nt, Human
uucuuuuccacccgucuuugguauguauuggc

SEQ ID NO: 538052 - RNA, 32 nt, Human
uucuuuuccaccugccccaugccuuuugguug

SEQ ID NO: 538053 - RNA, 32 nt, Human
uucuuuuccagaaauacaaugcuagguguuuu

SEQ ID NO: 538054 - RNA, 32 nt, Human
uucuuuuccagccuccagccucucauuucugg

SEQ ID NO: 538055 - RNA, 24 nt, Human
uucuuuucccauugacuauauaca

SEQ ID NO: 538056 - RNA, 22 nt, Human
uucuuuucccauugccgugaca

SEQ ID NO: 538057 - RNA, 32 nt, Human
uucuuuuccuccuucucucuuucuugcuccaa

SEQ ID NO: 538058 - RNA, 32 nt, Human
uucuuuuccucuuugggaauccaaaugaugau

SEQ ID NO: 538059 - RNA, 32 nt, Human
uucuuuuccucuuuuuccccaagaggaagaau

SEQ ID NO: 538060 - RNA, 32 nt, Human
uucuuuuccugccucagcccagcucugcaaau

SEQ ID NO: 538061 - RNA, 32 nt, Human
uucuuuuccugcucagcuucuucgagguuggc

SEQ ID NO: 538062 - RNA, 32 nt, Human
uucuuuuccuucugccuuuuugggaaagagac

SEQ ID NO: 538063 - RNA, 32 nt, Human
uucuuuucuaagccauggagugagugagcagg

SEQ ID NO: 538064 - RNA, 32 nt, Human
uucuuuucucauucccucgucuccaccgggaa

SEQ ID NO: 538065 - RNA, 32 nt, Human
uucuuuucuccucaacccagcauuuuauuuaa

SEQ ID NO: 538066 - RNA, 32 nt, Human
uucuuuucuccucccuuuuacuuugccgguag

SEQ ID NO: 538067 - RNA, 32 nt, Human
uucuuuucuccuccucucuccuuccugcuguc

SEQ ID NO: 538068 - RNA, 32 nt, Human
uucuuuucugccggguaauggcugcuuccaag

SEQ ID NO: 538069 - RNA, 32 nt, Human
uucuuuucuggagucaggauguucucggucac

SEQ ID NO: 538070 - RNA, 32 nt, Human
uucuuuucuucagacuuaaagcagaaaggggu

SEQ ID NO: 538071 - RNA, 32 nt, Human
uucuuuucuucugcuucccuugccuauuugcu

SEQ ID NO: 538072 - RNA, 23 nt, Human
uucuuuucuuuucucugguaaua

SEQ ID NO: 538073 - RNA, 32 nt, Human
uucuuuugagcagcgauugcuggaucauugau

SEQ ID NO: 538074 - RNA, 32 nt, Human
uucuuuugcccagcaggguaauauugaguccc

SEQ ID NO: 538075 - RNA, 32 nt, Human
uucuuuugcccaggcuggagugcaguggcaca

SEQ ID NO: 538076 - RNA, 32 nt, Human
uucuuuugccuagguuggaguacagcggugaa

SEQ ID NO: 538077 - RNA, 32 nt, Human
uucuuuugcuuugguuguacaugaaaguuggu

SEQ ID NO: 538078 - RNA, 32 nt, Human
uucuuuuggagcuacuuugggguggggaaacu

SEQ ID NO: 538079 - RNA, 32 nt, Human
uucuuuuggaguaucuucaucuccucucauuu

SEQ ID NO: 538080 - RNA, 32 nt, Human
uucuuuuggcagcaguggugguaguggcggug

SEQ ID NO: 538081 - RNA, 32 nt, Human
uucuuuuggccccagcccugucccucacuguc

SEQ ID NO: 538082 - RNA, 32 nt, Human
uucuuuuggccuccucguuuuccuucucuuuu

SEQ ID NO: 538083 - RNA, 32 nt, Human
uucuuuuggguggcaaugguuuggauaucguu

SEQ ID NO: 538084 - RNA, 32 nt, Human
uucuuuugguuaaauauaauuuccaaacuuug

SEQ ID NO: 538085 - RNA, 32 nt, Human
uucuuuugugaagccucuucagccuugaucau

SEQ ID NO: 538086 - RNA, 32 nt, Human
uucuuuuuaauauaaaaauuagcuaggugcag

SEQ ID NO: 538087 - RNA, 32 nt, Human
uucuuuuuagagacugagccucaguauguugc

SEQ ID NO: 538088 - RNA, 32 nt, Human
uucuuuuuauucuucucuacagcauccauuca

SEQ ID NO: 538089 - RNA, 32 nt, Human
uucuuuuucccaaagcguuuuauuugaaagga

SEQ ID NO: 538090 - RNA, 32 nt, Human
uucuuuuucccucucaauuccaaggcauugga

SEQ ID NO: 538091 - RNA, 32 nt, Human
uucuuuuucccuuuccuuuccuuucauuuucu

SEQ ID NO: 538092 - RNA, 32 nt, Human
uucuuuuucuaugagcacacucugcugcuucu

SEQ ID NO: 538093 - RNA, 32 nt, Human
uucuuuuucucaaauaugccaucauaugggau

SEQ ID NO: 538094 - RNA, 32 nt, Human
uucuuuuucuccacaucuucugaggcuuuaga

SEQ ID NO: 538095 - RNA, 32 nt, Human
uucuuuuucucccaacuucgccacucagcccc

SEQ ID NO: 538096 - RNA, 32 nt, Human
uucuuuuucucucuuaaugucuugccuucugg

SEQ ID NO: 538097 - RNA, 32 nt, Human
uucuuuuucuuagcuuucuuccuucuuuucuc

SEQ ID NO: 538098 - RNA, 32 nt, Human
uucuuuuucuucugugggagaacuuaaugcug

SEQ ID NO: 538099 - RNA, 32 nt, Human
uucuuuuucuucuuguuucucaugaaaaguuu

SEQ ID NO: 538100 - RNA, 32 nt, Human
uucuuuuucuucuuuugagauggagucuugcu

SEQ ID NO: 538101 - RNA, 32 nt, Human
uucuuuuucuuuccuuccuacuugccuucuuu

SEQ ID NO: 538102 - RNA, 32 nt, Human
uucuuuuucuuuccuuccuuccuuuucuuuuc

SEQ ID NO: 538103 - RNA, 32 nt, Human
uucuuuuugaaauucgaggaaaggaggcaugg

SEQ ID NO: 538104 - RNA, 32 nt, Human
uucuuuuugaagaccauuuucuuccauuauug

SEQ ID NO: 538105 - RNA, 22 nt, Human
uucuuuuugagcaaaaaagucg

SEQ ID NO: 538106 - RNA, 32 nt, Human
uucuuuuugcccaggccuggacuuuuugcauc

SEQ ID NO: 538107 - RNA, 32 nt, Human
uucuuuuugcccaggcuggagugcaguggcgc

SEQ ID NO: 538108 - RNA, 32 nt, Human
uucuuuuugccuaggcuggagugcagugguac

SEQ ID NO: 538109 - RNA, 32 nt, Human
uucuuuuugucucccuucccucccucccuccc

SEQ ID NO: 538110 - RNA, 32 nt, Human
uucuuuuugugagcuuacuugccuggauugcu

SEQ ID NO: 538111 - RNA, 27 nt, Human
uucuuuuuucaucucuauuuagcaaca

SEQ ID NO: 538112 - RNA, 32 nt, Human
uugaaaaagauauuuaugauguuaacauuuca

SEQ ID NO: 538113 - RNA, 32 nt, Human
uugaaaaagaucgcgaauaaaaaucaacaaag

SEQ ID NO: 538114 - RNA, 32 nt, Human
uugaaaaauuauucuuuaauguauaaaguaau

SEQ ID NO: 538115 - RNA, 24 nt, Human
uugaaaacaaacaccuaguuuuca

SEQ ID NO: 538116 - RNA, 23 nt, Human
uugaaaacaaagaagacuucuca

SEQ ID NO: 538117 - RNA, 32 nt, Human
uugaaaacagcuuugaaacacaauucaucggu

SEQ ID NO: 538118 - RNA, 32 nt, Human
uugaaaacaggagguggagguugcagugagcc

SEQ ID NO: 538119 - RNA, 21 nt, Human
uugaaaacaucucaguuuuca

SEQ ID NO: 538120 - RNA, 32 nt, Human
uugaaaacccacccagauccuccccguucuga

SEQ ID NO: 538121 - RNA, 32 nt, Human
uugaaaacccccaauuucuugaaauggguguu

SEQ ID NO: 538122 - RNA, 32 nt, Human
uugaaaacggccucgggagacgggagcugcga

SEQ ID NO: 538123 - RNA, 32 nt, Human
uugaaaacucacauccuuucagcagaagguaa

SEQ ID NO: 538124 - RNA, 32 nt, Human
uugaaaacucauguaaauaaaaaucauagggu

SEQ ID NO: 538125 - RNA, 32 nt, Human
uugaaaacucuugcuuucuuuugguguccauu

SEQ ID NO: 538126 - RNA, 23 nt, Human
uugaaaacugcuaacauuuuuaa

SEQ ID NO: 538127 - RNA, 32 nt, Human
uugaaaagaaaauaggcgcuuugucuccuaca

SEQ ID NO: 538128 - RNA, 32 nt, Human
uugaaaagacuauugcuuauuuuuguuuuuaa

SEQ ID NO: 538129 - RNA, 32 nt, Human
uugaaaagagcaauuuugaaaaugcuguguuc

SEQ ID NO: 538130 - RNA, 32 nt, Human
uugaaaagccaucaaaaaguugugauaucaaa

SEQ ID NO: 538131 - RNA, 31 nt, Human
uugaaaagcuuguccaucacucuaguaggga

SEQ ID NO: 538132 - RNA, 32 nt, Human
uugaaaaggaaaugugcuuuaggcaugaguca

SEQ ID NO: 538133 - RNA, 32 nt, Human
uugaaaaggaccuuguagaaccucuuugcaga

SEQ ID NO: 538134 - RNA, 32 nt, Human
uugaaaaggacucuugagcccuccuggaaugg

SEQ ID NO: 538135 - RNA, 32 nt, Human
uugaaaaggaguuucgcucuuguccaggcugg

SEQ ID NO: 538136 - RNA, 32 nt, Human
uugaaaaggguaguuucucugcagaagcucua

SEQ ID NO: 538137 - RNA, 32 nt, Human
uugaaaaguaaacgauaaaauguggauuaaag

SEQ ID NO: 538138 - RNA, 32 nt, Human
uugaaaaguuagaucugugaucucugggguuu

SEQ ID NO: 538139 - RNA, 32 nt, Human
uugaaaauaaauggcccacaggguaaacacug

SEQ ID NO: 538140 - RNA, 32 nt, Human
uugaaaauacaguggacugaaaagcaaauuua

SEQ ID NO: 538141 - RNA, 32 nt, Human
uugaaaauauuuccucuauaucaugccuggag

SEQ ID NO: 538142 - RNA, 32 nt, Human
uugaaaauauuuccuuuaaagacagaguuuga

SEQ ID NO: 538143 - RNA, 32 nt, Human
uugaaaaucacacacaucacaucaccagugcc

SEQ ID NO: 538144 - RNA, 23 nt, Human
uugaaaauccaaaagccaucuca

SEQ ID NO: 538145 - RNA, 32 nt, Human
uugaaaauccccaaggaaacugaagaugauca

SEQ ID NO: 538146 - RNA, 32 nt, Human
uugaaaaugagcagguagaauauacauugaua

SEQ ID NO: 538147 - RNA, 32 nt, Human
uugaaaaugcuuauucuuccucccuuuuauuu

SEQ ID NO: 538148 - RNA, 32 nt, Human
uugaaaaugcuuccaaaaguagacccuguccc

SEQ ID NO: 538149 - RNA, 32 nt, Human
uugaaaauggagugaacaggaggcaaagccac

SEQ ID NO: 538150 - RNA, 32 nt, Human
uugaaaauuaaagcugcaaaagaaauaaagug

SEQ ID NO: 538151 - RNA, 32 nt, Human
uugaaaauucgcccgagcuguuuauguuuuua

SEQ ID NO: 538152 - RNA, 32 nt, Human
uugaaaauucugaggcaggcuguaugucugua

SEQ ID NO: 538153 - RNA, 32 nt, Human
uugaaacaaagcuguuugcugcuuuaugcagg

SEQ ID NO: 538154 - RNA, 32 nt, Human
uugaaacaaaugaccuguucaucuguggccau

SEQ ID NO: 538155 - RNA, 32 nt, Human
uugaaacaaccuccuucucucuuuugaaugga

SEQ ID NO: 538156 - RNA, 32 nt, Human
uugaaacaacuggccccagcuggcgcaucaga

SEQ ID NO: 538157 - RNA, 23 nt, Human
uugaaacaauaaaauccaacaga

SEQ ID NO: 538158 - RNA, 32 nt, Human
uugaaacaaugagaauacucugugcauuucaa

SEQ ID NO: 538159 - RNA, 32 nt, Human
uugaaacaauugccaucuuuguaguuaugccu

SEQ ID NO: 538160 - RNA, 32 nt, Human
uugaaacaauuuaggggaaugaggggcaaaag

SEQ ID NO: 538161 - RNA, 32 nt, Human
uugaaacacauauucaucauacaucaaagcuc

SEQ ID NO: 538162 - RNA, 32 nt, Human
uugaaacacauccuaagcgucuggugcugcag

SEQ ID NO: 538163 - RNA, 32 nt, Human
uugaaacaggagaugaaagacucuccauuuca

SEQ ID NO: 538164 - RNA, 32 nt, Human
uugaaacauccagcaagacaggccagagugug

SEQ ID NO: 538165 - RNA, 32 nt, Human
uugaaacaucuucccugugucccugggggccc

SEQ ID NO: 538166 - RNA, 32 nt, Human
uugaaaccacuacuguauugccuggauacaca

SEQ ID NO: 538167 - RNA, 32 nt, Human
uugaaaccagcauggccaacagaugugagcca

SEQ ID NO: 538168 - RNA, 32 nt, Human
uugaaaccagccuagguaacauagugagaccc

SEQ ID NO: 538169 - RNA, 32 nt, Human
uugaaaccagccuggacuacauggugaaacuc

SEQ ID NO: 538170 - RNA, 32 nt, Human
uugaaaccagccuggccaacauggcgaaaccc

SEQ ID NO: 538171 - RNA, 32 nt, Human
uugaaaccagccuggccaacauggugaaaacc

SEQ ID NO: 538172 - RNA, 32 nt, Human
uugaaaccagccuggccaacauggugaaaccc

SEQ ID NO: 538173 - RNA, 32 nt, Human
uugaaaccagccuggccaacauggugaaauuc

SEQ ID NO: 538174 - RNA, 32 nt, Human
uugaaaccagccuggccaacguggugagaccc

SEQ ID NO: 538175 - RNA, 32 nt, Human
uugaaaccagccugggcaacauggugaaaccu

SEQ ID NO: 538176 - RNA, 32 nt, Human
uugaaaccagcuguuucccaaacucugcuucc

SEQ ID NO: 538177 - RNA, 32 nt, Human
uugaaaccaggaguucaggaccagccuggaaa

SEQ ID NO: 538178 - RNA, 32 nt, Human
uugaaaccaggaguuugagaccagccugagca

SEQ ID NO: 538179 - RNA, 32 nt, Human
uugaaaccauccuggcuaacacagugaaaccc

SEQ ID NO: 538180 - RNA, 32 nt, Human
uugaaacccagaaggcagggguugcagugagc

SEQ ID NO: 538181 - RNA, 32 nt, Human
uugaaacccgggaaguggagguugcagugagc

SEQ ID NO: 538182 - RNA, 32 nt, Human
uugaaacccguguaauggugacccuuugagcg

SEQ ID NO: 538183 - RNA, 32 nt, Human
uugaaaccuaccuaggcaacauggugaaaccu

SEQ ID NO: 538184 - RNA, 32 nt, Human
uugaaaccuuugccuucuguuccagaggagaa

SEQ ID NO: 538185 - RNA, 32 nt, Human
uugaaacgggaggcggagguugcagugagccg

SEQ ID NO: 538186 - RNA, 32 nt, Human
uugaaacuagaacuagugguuuuagagaacuc

SEQ ID NO: 538187 - RNA, 32 nt, Human
uugaaacuagccuggccaacguggcaaaacuc

SEQ ID NO: 538188 - RNA, 32 nt, Human
uugaaacuaggaguucaagaccagccaaggca

SEQ ID NO: 538189 - RNA, 32 nt, Human
uugaaacuagucuggucaacauggugaaaccc

SEQ ID NO: 538190 - RNA, 32 nt, Human
uugaaacugaacaagccaccugccuucccuga

SEQ ID NO: 538191 - RNA, 32 nt, Human
uugaaacugggagguggagguugcagugagcc

SEQ ID NO: 538192 - RNA, 32 nt, Human
uugaaacugguuggggaaugaggugauaagca

SEQ ID NO: 538193 - RNA, 32 nt, Human
uugaaacuguauaaauuguuuaucucuuaaac

SEQ ID NO: 538194 - RNA, 32 nt, Human
uugaaacuucuuucucuaccuuuugcaaaaua

SEQ ID NO: 538195 - RNA, 32 nt, Human
uugaaacuuuccucgccuuccaccuccugcuc

SEQ ID NO: 538196 - RNA, 32 nt, Human
uugaaacuuucugcuuugccuccuuccauggc

SEQ ID NO: 538197 - RNA, 32 nt, Human
uugaaagaagugaaaauaaacagccagagauu

SEQ ID NO: 538198 - RNA, 32 nt, Human
uugaaagaaguugauuccaacucucauggaug

SEQ ID NO: 538199 - RNA, 32 nt, Human
uugaaagacacacacccaggcaaccccugagg

SEQ ID NO: 538200 - RNA, 32 nt, Human
uugaaagacaucuuuucaucaugggacagcaa

SEQ ID NO: 538201 - RNA, 32 nt, Human
uugaaagacgaaaucaaagcccauuaaugauu

SEQ ID NO: 538202 - RNA, 32 nt, Human
uugaaagacuguaggaaacacuucaauguagu

SEQ ID NO: 538203 - RNA, 32 nt, Human
uugaaagagagccaggccgcugagggggaggg

SEQ ID NO: 538204 - RNA, 32 nt, Human
uugaaagagccucuuaaggcagcugggacaga

SEQ ID NO: 538205 - RNA, 32 nt, Human
uugaaagauauggaagacagagcccaggccau

SEQ ID NO: 538206 - RNA, 32 nt, Human
uugaaagaugccugugcucugcuucaggcuga

SEQ ID NO: 538207 - RNA, 32 nt, Human
uugaaagaugcugaagcccgggccauacccca

SEQ ID NO: 538208 - RNA, 31 nt, Human
uugaaagcacuuuuaccacauggagaaauau

SEQ ID NO: 538209 - RNA, 32 nt, Human
uugaaagcagacaagauacagagcagauaucc

SEQ ID NO: 538210 - RNA, 32 nt, Human
uugaaagcagaggcauccuugagcuuuaaagc

SEQ ID NO: 538211 - RNA, 32 nt, Human
uugaaagccacagaguuaagugaccucaggua

SEQ ID NO: 538212 - RNA, 24 nt, Human
uugaaagccccagaugacagaaag

SEQ ID NO: 538213 - RNA, 22 nt, Human
uugaaagccuacuuucugaaga

SEQ ID NO: 538214 - RNA, 32 nt, Human
uugaaagccuuauucugaauguaagcaaagua

SEQ ID NO: 538215 - RNA, 32 nt, Human
uugaaagcuucaaaguuuauaugccuggugca

SEQ ID NO: 538216 - RNA, 32 nt, Human
uugaaaggaaacuagggagggagggagaggga

SEQ ID NO: 538217 - RNA, 32 nt, Human
uugaaaggaaucaugucuucagccuggaagac

SEQ ID NO: 538218 - RNA, 32 nt, Human
uugaaaggacugcccuuugcucuaucaccuuu

SEQ ID NO: 538219 - RNA, 32 nt, Human
uugaaaggcaaaaacuuccaucacaacaagaa

SEQ ID NO: 538220 - RNA, 32 nt, Human
uugaaaggccagaggguggccuuuuuccccaa

SEQ ID NO: 538221 - RNA, 32 nt, Human
uugaaaggccaucagauuagcagggacggggu

SEQ ID NO: 538222 - RNA, 32 nt, Human
uugaaaggcccaggcucguugccaggcaccau

SEQ ID NO: 538223 - RNA, 32 nt, Human
uugaaaggcugaggcaacaggaucauuugagc

SEQ ID NO: 538224 - RNA, 32 nt, Human
uugaaaggcugaggcaggagaaucgcuugaac

SEQ ID NO: 538225 - RNA, 32 nt, Human
uugaaagggaccaaguagcucacuacgauauc

SEQ ID NO: 538226 - RNA, 32 nt, Human
uugaaagggcaggcagguggugagagccagag

SEQ ID NO: 538227 - RNA, 32 nt, Human
uugaaagggggaaauaggaagagcagauugcu

SEQ ID NO: 538228 - RNA, 21 nt, Human
uugaaaguagaucgaacagaa

SEQ ID NO: 538229 - RNA, 32 nt, Human
uugaaagucuaagagaauaugcaagcuaccca

SEQ ID NO: 538230 - RNA, 32 nt, Human
uugaaagucuguccuugaaggacuaauagaaa

SEQ ID NO: 538231 - RNA, 23 nt, Human
uugaaagucuuaaaggagacacu

SEQ ID NO: 538232 - RNA, 21 nt, Human
uugaaagucuuguaacagaaa

SEQ ID NO: 538233 - RNA, 21 nt, Human
uugaaagugaagaagagaaag

SEQ ID NO: 538234 - RNA, 32 nt, Human
uugaaagugagugguguccuuuggaggcaugg

SEQ ID NO: 538235 - RNA, 32 nt, Human
uugaaaguggcaaaauggagguuucacaggcu

SEQ ID NO: 538236 - RNA, 32 nt, Human
uugaaaguugccuuuucucuccacccuugagu

SEQ ID NO: 538237 - RNA, 32 nt, Human
uugaaaguuggaaacuaucccauugcaaguuu

SEQ ID NO: 538238 - RNA, 16 nt, Human
uugaaaguuucugaga

SEQ ID NO: 538239 - RNA, 22 nt, Human
uugaaaguuuguucugcagaga

SEQ ID NO: 538240 - RNA, 32 nt, Human
uugaaauaaccagccucugaaggagccaaugg

SEQ ID NO: 538241 - RNA, 32 nt, Human
uugaaauaccaccucucaggugaagaaccguc

SEQ ID NO: 538242 - RNA, 32 nt, Human
uugaaauacuugcuggcacugcaccuggauuu

SEQ ID NO: 538243 - RNA, 32 nt, Human
uugaaauagauuucauuucuugugcacacagc

SEQ ID NO: 538244 - RNA, 32 nt, Human
uugaaauauauguauguauucauggauaugua

SEQ ID NO: 538245 - RNA, 32 nt, Human
uugaaaucauuuacuguaagugcaaugaugca

SEQ ID NO: 538246 - RNA, 32 nt, Human
uugaaauccugcugguaguguaugacaacguc

SEQ ID NO: 538247 - RNA, 32 nt, Human
uugaaauccuggaacagcuggcucagacauuu

SEQ ID NO: 538248 - RNA, 32 nt, Human
uugaaaucuguucaaaaacagauuaagacaaa

SEQ ID NO: 538249 - RNA, 32 nt, Human
uugaaaugaaaccacaggcagcccagcccucc

SEQ ID NO: 538250 - RNA, 32 nt, Human
uugaaaugcaagaaauaacaaugauggcagca

SEQ ID NO: 538251 - RNA, 32 nt, Human
uugaaaugccuaaaagacuuuauuguucuaau

SEQ ID NO: 538252 - RNA, 32 nt, Human
uugaaaugccuuucaaccauuuccuucugugg

SEQ ID NO: 538253 - RNA, 32 nt, Human
uugaaaugcgaaaaauuagauugaggcuuugc

SEQ ID NO: 538254 - RNA, 32 nt, Human
uugaaaugcuccauaacaaaauugaaaaacug

SEQ ID NO: 538255 - RNA, 32 nt, Human
uugaaauggaauuggcaaugugggaaauaaga

SEQ ID NO: 538256 - RNA, 32 nt, Human
uugaaauggacucugagauggcagcguggugc

SEQ ID NO: 538257 - RNA, 32 nt, Human
uugaaauggagaggagguaggagggugagguc

SEQ ID NO: 538258 - RNA, 32 nt, Human
uugaaauggaguuuugcucuuguugcccaggc

SEQ ID NO: 538259 - RNA, 32 nt, Human
uugaaauggucauugaggaagcaacuacagau

SEQ ID NO: 538260 - RNA, 32 nt, Human
uugaaaugugccaaauuuucuuaccucaucuc

SEQ ID NO: 538261 - RNA, 32 nt, Human
uugaaauguggugagagaggaauugaauugaa

SEQ ID NO: 538262 - RNA, 32 nt, Human
uugaaaugugugacucugcugagugacguagg

SEQ ID NO: 538263 - RNA, 32 nt, Human
uugaaauguguguggaggcuuacacauagaga

SEQ ID NO: 538264 - RNA, 32 nt, Human
uugaaauuaaauauccuuaaccaaugauuaaa

SEQ ID NO: 538265 - RNA, 32 nt, Human
uugaaauuaccuccauucuuacuuuguuagca

SEQ ID NO: 538266 - RNA, 32 nt, Human
uugaaauuauucacuuauuuuccaaguauuua

SEQ ID NO: 538267 - RNA, 32 nt, Human
uugaaauucagccuuaaauuaagcucuuaguu

SEQ ID NO: 538268 - RNA, 32 nt, Human
uugaaauucccagaagagagcuguuuuguaau

SEQ ID NO: 538269 - RNA, 32 nt, Human
uugaaauucuguuuacacuugucagaaauaag

SEQ ID NO: 538270 - RNA, 32 nt, Human
uugaaauugccuggggucuaugaagucuuauu

SEQ ID NO: 538271 - RNA, 32 nt, Human
uugaaauuucuaagggcauucuagaccucugu

SEQ ID NO: 538272 - RNA, 32 nt, Human
uugaaauuuggggaggcaucucugauuuaaaa

SEQ ID NO: 538273 - RNA, 32 nt, Human
uugaaauuuguagguacuaucugucuuauuuu

SEQ ID NO: 538274 - RNA, 22 nt, Human
uugaacaaacauucuuaacucc

SEQ ID NO: 538275 - RNA, 32 nt, Human
uugaacaagccacguugcagaaaaagagcuuc

SEQ ID NO: 538276 - RNA, 32 nt, Human
uugaacaaggaagaggagaaaagggaauuuug

SEQ ID NO: 538277 - RNA, 32 nt, Human
uugaacaauguacucccuggccuggauacauu

SEQ ID NO: 538278 - RNA, 32 nt, Human
uugaacacagaagguggagguugcagugagcc

SEQ ID NO: 538279 - RNA, 32 nt, Human
uugaacacaggcaaagaggugcugcuuugcuu

SEQ ID NO: 538280 - RNA, 24 nt, Human
uugaacacaguauuuucccaauag

SEQ ID NO: 538281 - RNA, 32 nt, Human
uugaacaccaggaaugacuggaacccuggaga

SEQ ID NO: 538282 - RNA, 32 nt, Human
uugaacagcggcuggagcagguugagaguggc

SEQ ID NO: 538283 - RNA, 32 nt, Human
uugaacagggaagcagagguugcggugaaccg

SEQ ID NO: 538284 - RNA, 32 nt, Human
uugaacagggaggcagagguugcagugagccg

SEQ ID NO: 538285 - RNA, 32 nt, Human
uugaacagggugagacaguccacccagagcuc

SEQ ID NO: 538286 - RNA, 32 nt, Human
uugaacaguagaccuaaaaggguuuuaagcua

SEQ ID NO: 538287 - RNA, 32 nt, Human
uugaacaguccagcaauagcaauccagaauug

SEQ ID NO: 538288 - RNA, 32 nt, Human
uugaacaguccugggcacugcugguaaauuaa

SEQ ID NO: 538289 - RNA, 32 nt, Human
uugaacagugaucuuugcucucugccuggcuc

SEQ ID NO: 538290 - RNA, 32 nt, Human
uugaacauauagauauguaacaugccacaaau

SEQ ID NO: 538291 - RNA, 32 nt, Human
uugaacauccugcagucacagggucagggguc

SEQ ID NO: 538292 - RNA, 18 nt, Human
uugaacauguaugauuuc

SEQ ID NO: 538293 - RNA, 32 nt, Human
uugaacauucaggccuugcuggguucccugcu

SEQ ID NO: 538294 - RNA, 32 nt, Human
uugaaccaacccaaauguccaacaaugauaga

SEQ ID NO: 538295 - RNA, 32 nt, Human
uugaaccaacugucuucuggaucuauuggaua

SEQ ID NO: 538296 - RNA, 32 nt, Human
uugaaccaaggagguggagguugcagugagcc

SEQ ID NO: 538297 - RNA, 32 nt, Human
uugaaccacaucugcaccugugagaggccagu

SEQ ID NO: 538298 - RNA, 32 nt, Human
uugaaccaggaauauccaggaagaggaaauuc

SEQ ID NO: 538299 - RNA, 32 nt, Human
uugaaccaggagacggagguugcagugagcug

SEQ ID NO: 538300 - RNA, 32 nt, Human
uugaaccaggagacggagguuucagugaauga

SEQ ID NO: 538301 - RNA, 32 nt, Human
uugaaccaggagguggacguugcagugauccc

SEQ ID NO: 538302 - RNA, 32 nt, Human
uugaaccaggauggggagguugcagugagccg

SEQ ID NO: 538303 - RNA, 32 nt, Human
uugaaccagggaggcagaggcugcggugagcc

SEQ ID NO: 538304 - RNA, 32 nt, Human
uugaaccagggagguggagguugcagugagcc

SEQ ID NO: 538305 - RNA, 32 nt, Human
uugaaccagggagguggagguugcagugagcu

SEQ ID NO: 538306 - RNA, 32 nt, Human
uugaaccaguagugaaagcauuucucaacaau

SEQ ID NO: 538307 - RNA, 32 nt, Human
uugaaccagugaaauaugauguauuucugagc

SEQ ID NO: 538308 - RNA, 32 nt, Human
uugaaccaucucugccccaugcucaagaccug

SEQ ID NO: 538309 - RNA, 32 nt, Human
uugaacccaaaccagaguacucuuacugccuc

SEQ ID NO: 538310 - RNA, 32 nt, Human
uugaacccaagaggcggagguugcagugagcc

SEQ ID NO: 538311 - RNA, 32 nt, Human
uugaacccaagaggcggagguuguggugagcc

SEQ ID NO: 538312 - RNA, 32 nt, Human
uugaacccaagaggucgaggcugcagugagcc

SEQ ID NO: 538313 - RNA, 32 nt, Human
uugaacccaagagguggaggcugaagugagcc

SEQ ID NO: 538314 - RNA, 32 nt, Human
uugaacccaagagguggagguugcggugagcc

SEQ ID NO: 538315 - RNA, 32 nt, Human
uugaacccagaagacagguugcagugagccaa

SEQ ID NO: 538316 - RNA, 32 nt, Human
uugaacccagaaggcggaaguugcagugagcc

SEQ ID NO: 538317 - RNA, 32 nt, Human
uugaacccagaaggcggaaguugcagugagcu

SEQ ID NO: 538318 - RNA, 32 nt, Human
uugaacccagaaggugcagguugcagugagcu

SEQ ID NO: 538319 - RNA, 32 nt, Human
uugaacccagcagauggagguugcagugagcc

SEQ ID NO: 538320 - RNA, 32 nt, Human
uugaacccaggaagcggagguugcagugagcc

SEQ ID NO: 538321 - RNA, 32 nt, Human
uugaacccaggaagcgggguugcagugagcca

SEQ ID NO: 538322 - RNA, 32 nt, Human
uugaacccaggaaguagagguugcagugagcc

SEQ ID NO: 538323 - RNA, 32 nt, Human
uugaacccaggaaguggagguugcagugagcc

SEQ ID NO: 538324 - RNA, 32 nt, Human
uugaacccaggaaguggagguugcagugagcu

SEQ ID NO: 538325 - RNA, 32 nt, Human
uugaacccaggaaguggcaguugcagugagcc

SEQ ID NO: 538326 - RNA, 32 nt, Human
uugaacccaggagacagagguugcagugagcc

SEQ ID NO: 538327 - RNA, 32 nt, Human
uugaacccaggagacagagguuguagugagcu

SEQ ID NO: 538328 - RNA, 32 nt, Human
uugaacccaggagacagagguugugguggggc

SEQ ID NO: 538329 - RNA, 32 nt, Human
uugaacccaggagacagggguugcagugagcc

SEQ ID NO: 538330 - RNA, 32 nt, Human
uugaacccaggagacauggguugcagugagcc

SEQ ID NO: 538331 - RNA, 32 nt, Human
uugaacccaggagacgagguugcagugagccg

SEQ ID NO: 538332 - RNA, 32 nt, Human
uugaacccaggagacggaaguugcagugagcu

SEQ ID NO: 538333 - RNA, 32 nt, Human
uugaacccaggagacggagguugcagugagcc

SEQ ID NO: 538334 - RNA, 32 nt, Human
uugaacccaggagacggagguugcggugaguu

SEQ ID NO: 538335 - RNA, 32 nt, Human
uugaacccaggagacggugguugcagugagcc

SEQ ID NO: 538336 - RNA, 32 nt, Human
uugaacccaggagacggugguugcagugagcg

SEQ ID NO: 538337 - RNA, 32 nt, Human
uugaacccaggagaggaagguugcaguaagcu

SEQ ID NO: 538338 - RNA, 32 nt, Human
uugaacccaggagauagagguugcaaugagcc

SEQ ID NO: 538339 - RNA, 32 nt, Human
uugaacccaggagauggaaguugcagugagcu

SEQ ID NO: 538340 - RNA, 32 nt, Human
uugaacccaggagauggagauugcaguaggcc

SEQ ID NO: 538341 - RNA, 32 nt, Human
uugaacccaggagauggagguugcagugagcc

SEQ ID NO: 538342 - RNA, 32 nt, Human
uugaacccaggagauggagguugcagugagcu

SEQ ID NO: 538343 - RNA, 32 nt, Human
uugaacccaggagauggagguugcggugagcu

SEQ ID NO: 538344 - RNA, 32 nt, Human
uugaacccaggagauugagguuguagugagcu

SEQ ID NO: 538345 - RNA, 32 nt, Human
uugaacccaggaggaagagguugcagugagcc

SEQ ID NO: 538346 - RNA, 32 nt, Human
uugaacccaggaggcacagauugcagugagcc

SEQ ID NO: 538347 - RNA, 32 nt, Human
uugaacccaggaggcacagguugcagugagcc

SEQ ID NO: 538348 - RNA, 32 nt, Human
uugaacccaggaggcagaaguugcagugagca

SEQ ID NO: 538349 - RNA, 32 nt, Human
uugaacccaggaggcagaaguugcagugagcc

SEQ ID NO: 538350 - RNA, 32 nt, Human
uugaacccaggaggcagaaguugcagugagcu

SEQ ID NO: 538351 - RNA, 32 nt, Human
uugaacccaggaggcagagaucgcagugaguu

SEQ ID NO: 538352 - RNA, 32 nt, Human
uugaacccaggaggcagagauugcagugagcc

SEQ ID NO: 538353 - RNA, 32 nt, Human
uugaacccaggaggcagagauugcagugagcu

SEQ ID NO: 538354 - RNA, 32 nt, Human
uugaacccaggaggcagagauugcggugagcc

SEQ ID NO: 538355 - RNA, 32 nt, Human
uugaacccaggaggcagaggguugcagugagc

SEQ ID NO: 538356 - RNA, 32 nt, Human
uugaacccaggaggcagagguuacaguaaacc

SEQ ID NO: 538357 - RNA, 32 nt, Human
uugaacccaggaggcagagguuacagugagca

SEQ ID NO: 538358 - RNA, 32 nt, Human
uugaacccaggaggcagagguugcaaugagcc

SEQ ID NO: 538359 - RNA, 32 nt, Human
uugaacccaggaggcagagguugcagcgagcu

SEQ ID NO: 538360 - RNA, 32 nt, Human
uugaacccaggaggcagagguugcaguaagcc

SEQ ID NO: 538361 - RNA, 32 nt, Human
uugaacccaggaggcagagguugcagucagcc

SEQ ID NO: 538362 - RNA, 32 nt, Human
uugaacccaggaggcagagguugcagugagcc

SEQ ID NO: 538363 - RNA, 32 nt, Human
uugaacccaggaggcagagguugcagugagcu

SEQ ID NO: 538364 - RNA, 32 nt, Human
uugaacccaggaggcagagguugcagugaguc

SEQ ID NO: 538365 - RNA, 32 nt, Human
uugaacccaggaggcagagguugcagugcacc

SEQ ID NO: 538366 - RNA, 32 nt, Human
uugaacccaggaggcagagguugcagugcgcu

SEQ ID NO: 538367 - RNA, 32 nt, Human
uugaacccaggaggcagagguugcagugggcc

SEQ ID NO: 538368 - RNA, 32 nt, Human
uugaacccaggaggcagagguugcggugagcc

SEQ ID NO: 538369 - RNA, 32 nt, Human
uugaacccaggaggcagagguuggggugagcu

SEQ ID NO: 538370 - RNA, 32 nt, Human
uugaacccaggaggcagagguuguagugagcc

SEQ ID NO: 538371 - RNA, 32 nt, Human
uugaacccaggaggcagaguuugcagucagcc

SEQ ID NO: 538372 - RNA, 32 nt, Human
uugaacccaggaggcagaguuugcagugagcc

SEQ ID NO: 538373 - RNA, 32 nt, Human
uugaacccaggaggcagaguuugcagugagcu

SEQ ID NO: 538374 - RNA, 32 nt, Human
uugaacccaggaggcagcuguugcagugagcc

SEQ ID NO: 538375 - RNA, 32 nt, Human
uugaacccaggaggcagugauugcagugagcu

SEQ ID NO: 538376 - RNA, 32 nt, Human
uugaacccaggaggcagugguugcaaugagcc

SEQ ID NO: 538377 - RNA, 32 nt, Human
uugaacccaggaggccgagguugcagugagcc

SEQ ID NO: 538378 - RNA, 32 nt, Human
uugaacccaggaggcgaagguugcaguaaacc

SEQ ID NO: 538379 - RNA, 32 nt, Human
uugaacccaggaggcggaaguugcagugagcu

SEQ ID NO: 538380 - RNA, 32 nt, Human
uugaacccaggaggcggagauugcagugagcc

SEQ ID NO: 538381 - RNA, 32 nt, Human
uugaacccaggaggcggagauugcagugagcu

SEQ ID NO: 538382 - RNA, 32 nt, Human
uugaacccaggaggcggagcuugcagugagcc

SEQ ID NO: 538383 - RNA, 32 nt, Human
uugaacccaggaggcggaggcugcagugagcc

SEQ ID NO: 538384 - RNA, 32 nt, Human
uugaacccaggaggcggaggcugcagugagcu

SEQ ID NO: 538385 - RNA, 32 nt, Human
uugaacccaggaggcggagguagcagugagcc

SEQ ID NO: 538386 - RNA, 32 nt, Human
uugaacccaggaggcggagguuacagugagcc

SEQ ID NO: 538387 - RNA, 32 nt, Human
uugaacccaggaggcggagguugcaguaagcc

SEQ ID NO: 538388 - RNA, 32 nt, Human
uugaacccaggaggcggagguugcagugaacc

SEQ ID NO: 538389 - RNA, 32 nt, Human
uugaacccaggaggcggagguugcagugaccc

SEQ ID NO: 538390 - RNA, 32 nt, Human
uugaacccaggaggcggagguugcagugagac

SEQ ID NO: 538391 - RNA, 32 nt, Human
uugaacccaggaggcggagguugcagugagca

SEQ ID NO: 538392 - RNA, 32 nt, Human
uugaacccaggaggcggagguugcagugagcc

SEQ ID NO: 538393 - RNA, 32 nt, Human
uugaacccaggaggcggagguugcagugagcu

SEQ ID NO: 538394 - RNA, 32 nt, Human
uugaacccaggaggcggagguugcagugaucc

SEQ ID NO: 538395 - RNA, 32 nt, Human
uugaacccaggaggcggagguugcggugagcc

SEQ ID NO: 538396 - RNA, 32 nt, Human
uugaacccaggaggcggagguugcggugagcu

SEQ ID NO: 538397 - RNA, 32 nt, Human
uugaacccaggaggcggagguugcggugaguu

SEQ ID NO: 538398 - RNA, 32 nt, Human
uugaacccaggaggcggagguuguagugagcc

SEQ ID NO: 538399 - RNA, 32 nt, Human
uugaacccaggaggcggagguuguauaggcug

SEQ ID NO: 538400 - RNA, 32 nt, Human
uugaacccaggaggcggagguuguggugagcc

SEQ ID NO: 538401 - RNA, 32 nt, Human
uugaacccaggaggcggaguuugcagugagcu

SEQ ID NO: 538402 - RNA, 32 nt, Human
uugaacccaggaggcggggguugcagugaguc

SEQ ID NO: 538403 - RNA, 32 nt, Human
uugaacccaggaggcugagguugcagugagcc

SEQ ID NO: 538404 - RNA, 32 nt, Human
uugaacccaggagguagaagcugcagugagca

SEQ ID NO: 538405 - RNA, 32 nt, Human
uugaacccaggagguagaaguugcagugagcc

SEQ ID NO: 538406 - RNA, 32 nt, Human
uugaacccaggagguagaggcugcagugagca

SEQ ID NO: 538407 - RNA, 32 nt, Human
uugaacccaggagguagaggcugcagugagcc

SEQ ID NO: 538408 - RNA, 32 nt, Human
uugaacccaggagguagaggcugcagugagcu

SEQ ID NO: 538409 - RNA, 32 nt, Human
uugaacccaggagguagagguugcagugagcc

SEQ ID NO: 538410 - RNA, 32 nt, Human
uugaacccaggaggugaagguugcagugaccg

SEQ ID NO: 538411 - RNA, 32 nt, Human
uugaacccaggaggugcagguugcagugagcc

SEQ ID NO: 538412 - RNA, 32 nt, Human
uugaacccaggagguggagauugcagugagcu

SEQ ID NO: 538413 - RNA, 32 nt, Human
uugaacccaggagguggaggaugcagugaacu

SEQ ID NO: 538414 - RNA, 32 nt, Human
uugaacccaggagguggaggcugcagugagcu

SEQ ID NO: 538415 - RNA, 32 nt, Human
uugaacccaggagguggaggcugcggugagcc

SEQ ID NO: 538416 - RNA, 32 nt, Human
uugaacccaggagguggagguagcagugagcc

SEQ ID NO: 538417 - RNA, 32 nt, Human
uugaacccaggagguggagguuacagugagcc

SEQ ID NO: 538418 - RNA, 32 nt, Human
uugaacccaggagguggagguuacagugagcu

SEQ ID NO: 538419 - RNA, 32 nt, Human
uugaacccaggagguggagguuccagugagcc

SEQ ID NO: 538420 - RNA, 32 nt, Human
uugaacccaggagguggagguugcaagugagc

SEQ ID NO: 538421 - RNA, 32 nt, Human
uugaacccaggagguggagguugcagcaagca

SEQ ID NO: 538422 - RNA, 32 nt, Human
uugaacccaggagguggagguugcaguaagcc

SEQ ID NO: 538423 - RNA, 32 nt, Human
uugaacccaggagguggagguugcaguaagcu

SEQ ID NO: 538424 - RNA, 32 nt, Human
uugaacccaggagguggagguugcagugaacu

SEQ ID NO: 538425 - RNA, 32 nt, Human
uugaacccaggagguggagguugcagugagca

SEQ ID NO: 538426 - RNA, 32 nt, Human
uugaacccaggagguggagguugcagugagcc

SEQ ID NO: 538427 - RNA, 32 nt, Human
uugaacccaggagguggagguugcagugagcu

SEQ ID NO: 538428 - RNA, 32 nt, Human
uugaacccaggagguggagguugcagugaggc

SEQ ID NO: 538429 - RNA, 32 nt, Human
uugaacccaggagguggagguugcagugaguc

SEQ ID NO: 538430 - RNA, 32 nt, Human
uugaacccaggagguggagguugcagugggcc

SEQ ID NO: 538431 - RNA, 32 nt, Human
uugaacccaggagguggagguugcaguuagcu

SEQ ID NO: 538432 - RNA, 32 nt, Human
uugaacccaggagguggagguugcggugagcu

SEQ ID NO: 538433 - RNA, 32 nt, Human
uugaacccaggagguggagguuguagugagac

SEQ ID NO: 538434 - RNA, 32 nt, Human
uugaacccaggagguggagguuguggugagcc

SEQ ID NO: 538435 - RNA, 32 nt, Human
uugaacccaggagguggagguuguggugagcu

SEQ ID NO: 538436 - RNA, 32 nt, Human
uugaacccaggagguggaguuugcagugagcu

SEQ ID NO: 538437 - RNA, 32 nt, Human
uugaacccaggaggugggcauugcagugagcc

SEQ ID NO: 538438 - RNA, 32 nt, Human
uugaacccaggagguggugguugcagugagcc

SEQ ID NO: 538439 - RNA, 32 nt, Human
uugaacccaggagguugaggcugcagugaguc

SEQ ID NO: 538440 - RNA, 32 nt, Human
uugaacccaggagucagagguuucagugagcc

SEQ ID NO: 538441 - RNA, 32 nt, Human
uugaacccaggagucggagguugcagugaguu

SEQ ID NO: 538442 - RNA, 32 nt, Human
uugaacccaggaguucaaaucugcagugcgca

SEQ ID NO: 538443 - RNA, 32 nt, Human
uugaacccaggaguucaagaccagccuggaca

SEQ ID NO: 538444 - RNA, 32 nt, Human
uugaacccaggaguucaagaccagccugggca

SEQ ID NO: 538445 - RNA, 32 nt, Human
uugaacccaggaguucaagucugcagugagcu

SEQ ID NO: 538446 - RNA, 32 nt, Human
uugaacccaggaguucgagaccagccugggca

SEQ ID NO: 538447 - RNA, 32 nt, Human
uugaacccaggcaguggagguugcagugagcc

SEQ ID NO: 538448 - RNA, 32 nt, Human
uugaacccaggcaguggugggaugggagggca

SEQ ID NO: 538449 - RNA, 32 nt, Human
uugaacccaggccaugugguuagacguuggug

SEQ ID NO: 538450 - RNA, 32 nt, Human
uugaacccagggggcagagguugcagugagcc

SEQ ID NO: 538451 - RNA, 32 nt, Human
uugaacccaguaggcggaaguugcagugagcu

SEQ ID NO: 538452 - RNA, 32 nt, Human
uugaacccaguggcggaggcugcagugagccg

SEQ ID NO: 538453 - RNA, 32 nt, Human
uugaacccaugaggcggagguugcagugagcc

SEQ ID NO: 538454 - RNA, 32 nt, Human
uugaacccccgccauccuucaccagagcccau

SEQ ID NO: 538455 - RNA, 32 nt, Human
uugaaccccggagauggagguugcagugagcc

SEQ ID NO: 538456 - RNA, 32 nt, Human
uugaaccccggaggcggagguugcagugagcu

SEQ ID NO: 538457 - RNA, 32 nt, Human
uugaaccccggagguagagguugcagugagcc

SEQ ID NO: 538458 - RNA, 32 nt, Human
uugaacccgagaggcggaaguugcagugagcc

SEQ ID NO: 538459 - RNA, 32 nt, Human
uugaacccgagagguggagguugcagugaacc

SEQ ID NO: 538460 - RNA, 32 nt, Human
uugaacccgagagguggagguugcagugagcc

SEQ ID NO: 538461 - RNA, 32 nt, Human
uugaacccgcuuccaccuccgucucccucuuc

SEQ ID NO: 538462 - RNA, 32 nt, Human
uugaacccggaagcgaagguugcagugagcca

SEQ ID NO: 538463 - RNA, 32 nt, Human
uugaacccggaggcagagguugcagugagccg

SEQ ID NO: 538464 - RNA, 32 nt, Human
uugaacccggaggcggagguugcgguaagccg

SEQ ID NO: 538465 - RNA, 32 nt, Human
uugaacccgggagacgggagguuguggugagc

SEQ ID NO: 538466 - RNA, 32 nt, Human
uugaacccgggagaugaagguugcagugagcu

SEQ ID NO: 538467 - RNA, 32 nt, Human
uugaacccgggaggcaaagguugcagugagcu

SEQ ID NO: 538468 - RNA, 32 nt, Human
uugaacccgggaggcagaaguugcagugaacu

SEQ ID NO: 538469 - RNA, 32 nt, Human
uugaacccgggaggcagaggcugcagugagcc

SEQ ID NO: 538470 - RNA, 32 nt, Human
uugaacccgggaggcagagguugcaguaagca

SEQ ID NO: 538471 - RNA, 32 nt, Human
uugaacccgggaggcagagguugcagugagcc

SEQ ID NO: 538472 - RNA, 32 nt, Human
uugaacccgggaggcagagguugcagugagcu

SEQ ID NO: 538473 - RNA, 32 nt, Human
uugaacccgggaggcagagguugcagugaggu

SEQ ID NO: 538474 - RNA, 32 nt, Human
uugaacccgggaggcagagguugcagugaguc

SEQ ID NO: 538475 - RNA, 32 nt, Human
uugaacccgggaggcagagguugcagugagug

SEQ ID NO: 538476 - RNA, 32 nt, Human
uugaacccgggaggcagagguugcaguguggu

SEQ ID NO: 538477 - RNA, 32 nt, Human
uugaacccgggaggcagcaguugcagugagcu

SEQ ID NO: 538478 - RNA, 32 nt, Human
uugaacccgggaggcggaggcugcagugagcc

SEQ ID NO: 538479 - RNA, 32 nt, Human
uugaacccgggaggcggaggcugcagugaguc

SEQ ID NO: 538480 - RNA, 32 nt, Human
uugaacccgggaggcggagguugcaguaagcc

SEQ ID NO: 538481 - RNA, 32 nt, Human
uugaacccgggaggcggagguugcagugagcc

SEQ ID NO: 538482 - RNA, 32 nt, Human
uugaacccgggaggcggagguugcagugagcu

SEQ ID NO: 538483 - RNA, 32 nt, Human
uugaacccgggaggcggagguugcagugaggu

SEQ ID NO: 538484 - RNA, 32 nt, Human
uugaacccgggaggcggagguugcagugaguc

SEQ ID NO: 538485 - RNA, 32 nt, Human
uugaacccgggaggcggagguugcaguuagcc

SEQ ID NO: 538486 - RNA, 32 nt, Human
uugaacccgggagggagagguugcagugagcc

SEQ ID NO: 538487 - RNA, 32 nt, Human
uugaacccgggagguagaggcugcaaugggcc

SEQ ID NO: 538488 - RNA, 32 nt, Human
uugaacccgggagguagagguugcagugagcc

SEQ ID NO: 538489 - RNA, 32 nt, Human
uugaacccgggagguggaggcugcaaugagcu

SEQ ID NO: 538490 - RNA, 32 nt, Human
uugaacccgggagguggaggcugcagcgagcc

SEQ ID NO: 538491 - RNA, 32 nt, Human
uugaacccgggagguggaggcugcagugagcc

SEQ ID NO: 538492 - RNA, 32 nt, Human
uugaacccgggagguggaggcugcagugaguu

SEQ ID NO: 538493 - RNA, 32 nt, Human
uugaacccgggagguggaggcugcggugagcc

SEQ ID NO: 538494 - RNA, 32 nt, Human
uugaacccgggagguggagguugcaguaagcc

SEQ ID NO: 538495 - RNA, 32 nt, Human
uugaacccgggagguggagguugcagugaacc

SEQ ID NO: 538496 - RNA, 32 nt, Human
uugaacccgggagguggagguugcagugagcc

SEQ ID NO: 538497 - RNA, 32 nt, Human
uugaacccgggagguggagguugcagugagcu

SEQ ID NO: 538498 - RNA, 32 nt, Human
uugaacccgggagguggagguugcagugaggu

SEQ ID NO: 538499 - RNA, 32 nt, Human
uugaacccgggagguguagguugcagugagcc

SEQ ID NO: 538500 - RNA, 32 nt, Human
uugaacccgggaguuaaagguugcagugagcc

SEQ ID NO: 538501 - RNA, 32 nt, Human
uugaacccgggaguuggagguugcagugagcc

SEQ ID NO: 538502 - RNA, 32 nt, Human
uugaacccgggcggcggaaguugcagugagcc

SEQ ID NO: 538503 - RNA, 32 nt, Human
uugaacccggggacggagguugcagugaaccg

SEQ ID NO: 538504 - RNA, 32 nt, Human
uugaacccgggggcagaggcugcagugagccg

SEQ ID NO: 538505 - RNA, 32 nt, Human
uugaacccuccagguggugccgggcuggggcu

SEQ ID NO: 538506 - RNA, 32 nt, Human
uugaacccugcucuauccccugcccucuucca

SEQ ID NO: 538507 - RNA, 32 nt, Human
uugaacccuggaaguggagguugcagugagcc

SEQ ID NO: 538508 - RNA, 32 nt, Human
uugaacccuggaggcggaaguugcagugagcc

SEQ ID NO: 538509 - RNA, 32 nt, Human
uugaacccuggaggcggagguugcagugagcc

SEQ ID NO: 538510 - RNA, 32 nt, Human
uugaacccuggaggcggagguugcagugagug

SEQ ID NO: 538511 - RNA, 32 nt, Human
uugaacccuggagguagaaguugcagugagcc

SEQ ID NO: 538512 - RNA, 32 nt, Human
uugaacccuggagguggagguugcagugagcc

SEQ ID NO: 538513 - RNA, 32 nt, Human
uugaacccuggagguggagguugcagugagcu

SEQ ID NO: 538514 - RNA, 32 nt, Human
uugaacccugggagcggagauugcagugagcu

SEQ ID NO: 538515 - RNA, 32 nt, Human
uugaacccugggaggcagagguugcagugagu

SEQ ID NO: 538516 - RNA, 32 nt, Human
uugaacccuguaauugucacacaucucuggua

SEQ ID NO: 538517 - RNA, 32 nt, Human
uugaacccuugagcucaggaguuuggaccagc

SEQ ID NO: 538518 - RNA, 32 nt, Human
uugaaccgggaggcagaaguugcagugagccg

SEQ ID NO: 538519 - RNA, 32 nt, Human
uugaaccgggaggcggagguugcagugagccg

SEQ ID NO: 538520 - RNA, 32 nt, Human
uugaaccggggagguggaggcugcagugagcc

SEQ ID NO: 538521 - RNA, 32 nt, Human
uugaaccggggagguggagguugcagugagcu

SEQ ID NO: 538522 - RNA, 32 nt, Human
uugaaccuagaagguggagguugcagugagcg

SEQ ID NO: 538523 - RNA, 32 nt, Human
uugaaccuagaaugagacugcagcagccccag

SEQ ID NO: 538524 - RNA, 32 nt, Human
uugaaccuaggaggcagaaguugcagugagca

SEQ ID NO: 538525 - RNA, 32 nt, Human
uugaaccuaggaggcagagguugcagugaacc

SEQ ID NO: 538526 - RNA, 32 nt, Human
uugaaccuaggaggcagagguugcagugagcc

SEQ ID NO: 538527 - RNA, 32 nt, Human
uugaaccuaggaggcggagguugcagugagcc

SEQ ID NO: 538528 - RNA, 32 nt, Human
uugaaccuaggaggcggagguugcagugaguc

SEQ ID NO: 538529 - RNA, 32 nt, Human
uugaaccuaggaggggaagguugcagugagcc

SEQ ID NO: 538530 - RNA, 32 nt, Human
uugaaccuaggaggucgaggcugcagugagcc

SEQ ID NO: 538531 - RNA, 32 nt, Human
uugaaccuaggagguggagguugcagugagcc

SEQ ID NO: 538532 - RNA, 32 nt, Human
uugaaccuaggagguggagguugcagugagcu

SEQ ID NO: 538533 - RNA, 32 nt, Human
uugaaccuaggagguugaggcuauagugagcu

SEQ ID NO: 538534 - RNA, 32 nt, Human
uugaaccuaggaguucgagaccagccugggca

SEQ ID NO: 538535 - RNA, 32 nt, Human
uugaaccuaggaguuugagaccagccugggcg

SEQ ID NO: 538536 - RNA, 32 nt, Human
uugaaccuagggaggcagagguuguagugagc

SEQ ID NO: 538537 - RNA, 32 nt, Human
uugaaccuccaggauuccacggugcuguccca

SEQ ID NO: 538538 - RNA, 32 nt, Human
uugaaccuccugcucuagccuuggcggaggga

SEQ ID NO: 538539 - RNA, 32 nt, Human
uugaaccuccuuccuccaccaggauuugaagu

SEQ ID NO: 538540 - RNA, 32 nt, Human
uugaaccucggaggcugaaguugcagugagcc

SEQ ID NO: 538541 - RNA, 32 nt, Human
uugaaccugagaggugagguugcagugagccg

SEQ ID NO: 538542 - RNA, 32 nt, Human
uugaaccugagagguggagguugcagugagcc

SEQ ID NO: 538543 - RNA, 32 nt, Human
uugaaccugaggaaaaguuaaaguguagaaaa

SEQ ID NO: 538544 - RNA, 19 nt, Human
uugaaccugcagcccuggc

SEQ ID NO: 538545 - RNA, 32 nt, Human
uugaaccugccugccuccuaccugugugagcc

SEQ ID NO: 538546 - RNA, 32 nt, Human
uugaaccugcucugcugaguccccugggccau

SEQ ID NO: 538547 - RNA, 32 nt, Human
uugaaccuggaaggcggagguugcagugagca

SEQ ID NO: 538548 - RNA, 32 nt, Human
uugaaccuggaaggcggagguugcagugagcc

SEQ ID NO: 538549 - RNA, 32 nt, Human
uugaaccuggagacagagguugcagugagcug

SEQ ID NO: 538550 - RNA, 32 nt, Human
uugaaccuggaggcagagauugcagugagccg

SEQ ID NO: 538551 - RNA, 32 nt, Human
uugaaccuggaggcagagguugcagugagucg

SEQ ID NO: 538552 - RNA, 32 nt, Human
uugaaccuggagguggagguugcagugagccg

SEQ ID NO: 538553 - RNA, 32 nt, Human
uugaaccuggcagguggagguugcagugagug

SEQ ID NO: 538554 - RNA, 32 nt, Human
uugaaccugggaaguggaggcugcagugagcc

SEQ ID NO: 538555 - RNA, 32 nt, Human
uugaaccugggagauggaaguugcagugaacc

SEQ ID NO: 538556 - RNA, 32 nt, Human
uugaaccugggagauggaggcugcaguaagcc

SEQ ID NO: 538557 - RNA, 32 nt, Human
uugaaccugggagcaggagguugcagugagcc

SEQ ID NO: 538558 - RNA, 32 nt, Human
uugaaccugggagccugagguugcagugagcc

SEQ ID NO: 538559 - RNA, 32 nt, Human
uugaaccugggaggaggagguugcagugagcu

SEQ ID NO: 538560 - RNA, 32 nt, Human
uugaaccugggaggcagauguugcagugagcc

SEQ ID NO: 538561 - RNA, 32 nt, Human
uugaaccugggaggcagcgguugcaguaagcc

SEQ ID NO: 538562 - RNA, 32 nt, Human
uugaaccugggaggcaguuugcagugagcuga

SEQ ID NO: 538563 - RNA, 32 nt, Human
uugaaccugggaggcggaaguugcagugagcc

SEQ ID NO: 538564 - RNA, 32 nt, Human
uugaaccugggaggcggaaguugcagugagcu

SEQ ID NO: 538565 - RNA, 32 nt, Human
uugaaccugggaggcggaggcugcagugagcc

SEQ ID NO: 538566 - RNA, 32 nt, Human
uugaaccugggaggcggaggcugcagugagcu

SEQ ID NO: 538567 - RNA, 32 nt, Human
uugaaccugggaggcggagguugcaguaagcc

SEQ ID NO: 538568 - RNA, 32 nt, Human
uugaaccugggaggcggagguugcagugagcc

SEQ ID NO: 538569 - RNA, 32 nt, Human
uugaaccugggaggcggagguugcagugagcg

SEQ ID NO: 538570 - RNA, 32 nt, Human
uugaaccugggaggcggagguugcagugagcu

SEQ ID NO: 538571 - RNA, 32 nt, Human
uugaaccugggaggcggagguugcagugaguc

SEQ ID NO: 538572 - RNA, 32 nt, Human
uugaaccugggaggcggagguugcagugaguu

SEQ ID NO: 538573 - RNA, 32 nt, Human
uugaaccugggaggcugaaguugcagugagcc

SEQ ID NO: 538574 - RNA, 32 nt, Human
uugaaccugggagggcggagguugcagugagc

SEQ ID NO: 538575 - RNA, 32 nt, Human
uugaaccugggagguacagguugcagugagcc

SEQ ID NO: 538576 - RNA, 32 nt, Human
uugaaccugggagguagaaguugcagugagcc

SEQ ID NO: 538577 - RNA, 32 nt, Human
uugaaccugggagguagagguugcagugagcc

SEQ ID NO: 538578 - RNA, 32 nt, Human
uugaaccugggagguggaaguugcagugagcc

SEQ ID NO: 538579 - RNA, 32 nt, Human
uugaaccugggagguggaaguugcagugagcu

SEQ ID NO: 538580 - RNA, 32 nt, Human
uugaaccugggagguggaggcagugagcugag

SEQ ID NO: 538581 - RNA, 32 nt, Human
uugaaccugggagguggagguugcaguaagcc

SEQ ID NO: 538582 - RNA, 32 nt, Human
uugaaccugggagguggagguugcaguaagcu

SEQ ID NO: 538583 - RNA, 32 nt, Human
uugaaccugggagguggagguugcagugagca

SEQ ID NO: 538584 - RNA, 32 nt, Human
uugaaccugggagguggagguugcagugagcc

SEQ ID NO: 538585 - RNA, 32 nt, Human
uugaaccugggagguggagguugcagugagcu

SEQ ID NO: 538586 - RNA, 32 nt, Human
uugaaccugggagguggagguugcagugaguc

SEQ ID NO: 538587 - RNA, 32 nt, Human
uugaaccugggagguggagguugcagugaguu

SEQ ID NO: 538588 - RNA, 32 nt, Human
uugaaccugggagguggagguugcagugggcc

SEQ ID NO: 538589 - RNA, 32 nt, Human
uugaaccugggagguggagguugcagugggcu

SEQ ID NO: 538590 - RNA, 32 nt, Human
uugaaccugggagguggaguugcagugagccg

SEQ ID NO: 538591 - RNA, 32 nt, Human
uugaaccugggagguggauguugcagugagcu

SEQ ID NO: 538592 - RNA, 32 nt, Human
uugaaccugggagguggugguugcagugagcu

SEQ ID NO: 538593 - RNA, 32 nt, Human
uugaaccugggaguuggagguugcagugaaac

SEQ ID NO: 538594 - RNA, 32 nt, Human
uugaaccuggguggucgaggcugcagugagcc

SEQ ID NO: 538595 - RNA, 32 nt, Human
uugaaccuuauguaccgagcaaaugccagguc

SEQ ID NO: 538596 - RNA, 32 nt, Human
uugaacgaagugaaaaagcugcuaaaaaccaa

SEQ ID NO: 538597 - RNA, 32 nt, Human
uugaacgcaggaggcugaggcugcagugaguu

SEQ ID NO: 538598 - RNA, 32 nt, Human
uugaacgcugggagaaugcugggagccugcug

SEQ ID NO: 538599 - RNA, 32 nt, Human
uugaacgggucgagaugccgaccucagccuca

SEQ ID NO: 538600 - RNA, 32 nt, Human
uugaacguucacuaaaucuucaagcaaaaaca

SEQ ID NO: 538601 - RNA, 32 nt, Human
uugaacuacuaaauaugaaaauaagucauuug

SEQ ID NO: 538602 - RNA, 19 nt, Human
uugaacuacuuggggccuu

SEQ ID NO: 538603 - RNA, 32 nt, Human
uugaacuaggaggcagagguugcagugagccg

SEQ ID NO: 538604 - RNA, 32 nt, Human
uugaacucacugcucacugacaucuuaauugc

SEQ ID NO: 538605 - RNA, 32 nt, Human
uugaacucagaaggcggaggcugcagugagcc

SEQ ID NO: 538606 - RNA, 32 nt, Human
uugaacucagaagguggagguugcagugaggc

SEQ ID NO: 538607 - RNA, 32 nt, Human
uugaacucagaaguucaagaccagucugggca

SEQ ID NO: 538608 - RNA, 32 nt, Human
uugaacucaggaauucgagaccagccugggcu

SEQ ID NO: 538609 - RNA, 32 nt, Human
uugaacucaggagguggagguugcagugagcu

SEQ ID NO: 538610 - RNA, 32 nt, Human
uugaacucaggaguucaagaccagccugggaa

SEQ ID NO: 538611 - RNA, 32 nt, Human
uugaacucaggaguucaagaccagccugggca

SEQ ID NO: 538612 - RNA, 32 nt, Human
uugaacucaggaguuggagaccagccugggca

SEQ ID NO: 538613 - RNA, 32 nt, Human
uugaacucaggaguuuaagaccagccugggca

SEQ ID NO: 538614 - RNA, 32 nt, Human
uugaacucaggaguuugagaccagcuugggca

SEQ ID NO: 538615 - RNA, 20 nt, Human
uugaacucagggcccaagca

SEQ ID NO: 538616 - RNA, 18 nt, Human
uugaacuccagccccgca

SEQ ID NO: 538617 - RNA, 32 nt, Human
uugaacucccaaagugcugggauuacaggcgu

SEQ ID NO: 538618 - RNA, 32 nt, Human
uugaacucccagacucaagugauccuuccacc

SEQ ID NO: 538619 - RNA, 32 nt, Human
uugaacucccagucuccagaauagcugggacu

SEQ ID NO: 538620 - RNA, 32 nt, Human
uugaacuccugggcuacaguuacccuccuacc

SEQ ID NO: 538621 - RNA, 32 nt, Human
uugaacucgggaggcggagguugcagugagcc

SEQ ID NO: 538622 - RNA, 32 nt, Human
uugaacucgggaggcggauguugcagugagcc

SEQ ID NO: 538623 - RNA, 32 nt, Human
uugaacucgggaggugaaaguugcagugagcc

SEQ ID NO: 538624 - RNA, 32 nt, Human
uugaacucgggagguggagguugcagucagcc

SEQ ID NO: 538625 - RNA, 32 nt, Human
uugaacucgggagguggagguugcagugagcu

SEQ ID NO: 538626 - RNA, 32 nt, Human
uugaacucuuaugguugggacauucuuuuccu

SEQ ID NO: 538627 - RNA, 32 nt, Human
uugaacucuucggggguccuguugacccauuu

SEQ ID NO: 538628 - RNA, 32 nt, Human
uugaacugaccuuugauugguuucugcuucaa

SEQ ID NO: 538629 - RNA, 32 nt, Human
uugaacugaggagguggagguugcagugagcc

SEQ ID NO: 538630 - RNA, 32 nt, Human
uugaacugaggcagaggcuacagugaguggag

SEQ ID NO: 538631 - RNA, 32 nt, Human
uugaacugccaagaaaaggcauggagacagcg

SEQ ID NO: 538632 - RNA, 32 nt, Human
uugaacugcccuccucuccacccagcugcugc

SEQ ID NO: 538633 - RNA, 17 nt, Human
uugaacuggaaggucug

SEQ ID NO: 538634 - RNA, 32 nt, Human
uugaacuuaauggagcuuauguugagaaauaa

SEQ ID NO: 538635 - RNA, 32 nt, Human
uugaacuucagcuccagugucucuccagaaua

SEQ ID NO: 538636 - RNA, 32 nt, Human
uugaacuuccaugaaaccugucuuccaccaca

SEQ ID NO: 538637 - RNA, 22 nt, Human
uugaacuuccuaugaauggagu

SEQ ID NO: 538638 - RNA, 32 nt, Human
uugaacuugggagggguagguugcagugagcu

SEQ ID NO: 538639 - RNA, 32 nt, Human
uugaacuugggagguggagguugcagugagcc

SEQ ID NO: 538640 - RNA, 32 nt, Human
uugaacuugggagguggagguugcagugggcc

SEQ ID NO: 538641 - RNA, 22 nt, Human
uugaacuuucacauagcacaga

SEQ ID NO: 538642 - RNA, 32 nt, Human
uugaacuuuuauuuucuuguugauuauaaauc

SEQ ID NO: 538643 - RNA, 32 nt, Human
uugaacuuuuccuagggauuccgcuccacccg

SEQ ID NO: 538644 - RNA, 32 nt, Human
uugaagaaaaggagguuccagccuuggcaaga

SEQ ID NO: 538645 - RNA, 32 nt, Human
uugaagaagaaauggagaagcacagaaguaau

SEQ ID NO: 538646 - RNA, 32 nt, Human
uugaagaagaggcauccuucucugaugugcac

SEQ ID NO: 538647 - RNA, 32 nt, Human
uugaagaagauguaagaaugugucaagaccau

SEQ ID NO: 538648 - RNA, 32 nt, Human
uugaagaagccauggcgaaaucaaagacaaaa

SEQ ID NO: 538649 - RNA, 32 nt, Human
uugaagaagggccuucacacacaaaaccugau

SEQ ID NO: 538650 - RNA, 32 nt, Human
uugaagaauccugaugaaauauucaaacacau

SEQ ID NO: 538651 - RNA, 32 nt, Human
uugaagaaugcagcagccuuuuuguaaacuuc

SEQ ID NO: 538652 - RNA, 22 nt, Human
uugaagacaguuuaaagccaca

SEQ ID NO: 538653 - RNA, 32 nt, Human
uugaagaccagccugagaaauaaggugaaacc

SEQ ID NO: 538654 - RNA, 32 nt, Human
uugaagaccagccuggccaacauggcaaaaac

SEQ ID NO: 538655 - RNA, 32 nt, Human
uugaagaccagccuggccaacauggugaaacc

SEQ ID NO: 538656 - RNA, 32 nt, Human
uugaagaccagccugggcaacacagugagacu

SEQ ID NO: 538657 - RNA, 32 nt, Human
uugaagaccagccugggcaacauagugagaaa

SEQ ID NO: 538658 - RNA, 32 nt, Human
uugaagacccuuuaaagcagugaaucugaaac

SEQ ID NO: 538659 - RNA, 32 nt, Human
uugaagacuaggcuuuggagguuuucaaagca

SEQ ID NO: 538660 - RNA, 32 nt, Human
uugaagagcuaagaaaaucacugcaggaaaaa

SEQ ID NO: 538661 - RNA, 32 nt, Human
uugaagagcuaagaaaaucgcugcaggaaaaa

SEQ ID NO: 538662 - RNA, 32 nt, Human
uugaagagcuaguuaacaagcacagaaaauau

SEQ ID NO: 538663 - RNA, 32 nt, Human
uugaagaggaaagacuaguggacagggaggcc

SEQ ID NO: 538664 - RNA, 32 nt, Human
uugaagagggagacaagcuaaaagaggauauc

SEQ ID NO: 538665 - RNA, 32 nt, Human
uugaagagugcagcuuaauaaaugccagggaa

SEQ ID NO: 538666 - RNA, 32 nt, Human
uugaagaucggguugaggauuggggcuagcuc

SEQ ID NO: 538667 - RNA, 32 nt, Human
uugaagauuguggucuggcauaaggagaggug

SEQ ID NO: 538668 - RNA, 32 nt, Human
uugaagcacaguugucaguaggaaagggugga

SEQ ID NO: 538669 - RNA, 32 nt, Human
uugaagcagcaacuaucaagucugaaaagcaa

SEQ ID NO: 538670 - RNA, 32 nt, Human
uugaagcaggaggggcuggauuuggaaaaguc

SEQ ID NO: 538671 - RNA, 32 nt, Human
uugaagcaggaucagacccagccagcagagau

SEQ ID NO: 538672 - RNA, 32 nt, Human
uugaagcaguguuugcacggcaagcgcagcuu

SEQ ID NO: 538673 - RNA, 32 nt, Human
uugaagccaaaggaaucucacuuguggggccu

SEQ ID NO: 538674 - RNA, 32 nt, Human
uugaagccaccaaacugagaccuugauaccuu

SEQ ID NO: 538675 - RNA, 18 nt, Human
uugaagccacgcgcucca

SEQ ID NO: 538676 - RNA, 31 nt, Human
uugaagccacucaagccaguuggggaggaaa

SEQ ID NO: 538677 - RNA, 32 nt, Human
uugaagccacugccuucaccuucaccuucauc

SEQ ID NO: 538678 - RNA, 32 nt, Human
uugaagccagaaguucaagaccagccugcaca

SEQ ID NO: 538679 - RNA, 32 nt, Human
uugaagccagaggcagagguugcaaugagccg

SEQ ID NO: 538680 - RNA, 32 nt, Human
uugaagccaggacuucaagaccagcuuggcca

SEQ ID NO: 538681 - RNA, 32 nt, Human
uugaagccaggaggagagaugcagucuuagga

SEQ ID NO: 538682 - RNA, 32 nt, Human
uugaagccaggaggcggagguugcagugagcc

SEQ ID NO: 538683 - RNA, 32 nt, Human
uugaagccaggaguucaagaccagccuggcca

SEQ ID NO: 538684 - RNA, 32 nt, Human
uugaagccaggaguuccagaccagccugggca

SEQ ID NO: 538685 - RNA, 32 nt, Human
uugaagccaggaguuggagaccagccuaggca

SEQ ID NO: 538686 - RNA, 32 nt, Human
uugaagccaggaguuugagaccagcuuggaua

SEQ ID NO: 538687 - RNA, 32 nt, Human
uugaagccaggaguuugggaccagccugggca

SEQ ID NO: 538688 - RNA, 32 nt, Human
uugaagccaguaguucaagaccagccugggca

SEQ ID NO: 538689 - RNA, 32 nt, Human
uugaagccaguucaguaaucacacacauucca

SEQ ID NO: 538690 - RNA, 32 nt, Human
uugaagccgggagguggggguugcagugagcc

SEQ ID NO: 538691 - RNA, 32 nt, Human
uugaagccuagaauugucagcacuuccaacuu

SEQ ID NO: 538692 - RNA, 32 nt, Human
uugaagccuauuguuauaauuucuguugaaua

SEQ ID NO: 538693 - RNA, 32 nt, Human
uugaagccucagccuuccaucuguaaagggcg

SEQ ID NO: 538694 - RNA, 32 nt, Human
uugaagccucgcacuccugggcucaagugguc

SEQ ID NO: 538695 - RNA, 32 nt, Human
uugaagccugacuccauucuauuugccuggag

SEQ ID NO: 538696 - RNA, 32 nt, Human
uugaagcgacccggaagcggaaguggaagaaa

SEQ ID NO: 538697 - RNA, 32 nt, Human
uugaagcggagaccauuuccaggccuuauuga

SEQ ID NO: 538698 - RNA, 32 nt, Human
uugaagcuaggaguuagagaccagccugggca

SEQ ID NO: 538699 - RNA, 32 nt, Human
uugaagcuaggaguuugagaccagccugggca

SEQ ID NO: 538700 - RNA, 32 nt, Human
uugaagcuaguucaguaaucacacacauucca

SEQ ID NO: 538701 - RNA, 32 nt, Human
uugaagcuauucuccccuaauuaauaucucga

SEQ ID NO: 538702 - RNA, 32 nt, Human
uugaagcucaacuccauuguuuccagguguug

SEQ ID NO: 538703 - RNA, 32 nt, Human
uugaagcucuuguccugcacugucuuuaggua

SEQ ID NO: 538704 - RNA, 32 nt, Human
uugaagcugaccuaaucucuuugccuaacaac

SEQ ID NO: 538705 - RNA, 32 nt, Human
uugaagcugagaguucaagaccaaccugggca

SEQ ID NO: 538706 - RNA, 32 nt, Human
uugaagcuggaaaaccagauagauaggacaac

SEQ ID NO: 538707 - RNA, 32 nt, Human
uugaagcuggaaaaccagauagauggguugac

SEQ ID NO: 538708 - RNA, 32 nt, Human
uugaagcuggaaaaccugauaggugagacuac

SEQ ID NO: 538709 - RNA, 32 nt, Human
uugaagcugggcugucucucuccauguuggcc

SEQ ID NO: 538710 - RNA, 32 nt, Human
uugaagcuggugccucauugaggccauauuag

SEQ ID NO: 538711 - RNA, 32 nt, Human
uugaagcugugauugacauuuuucucauaaug

SEQ ID NO: 538712 - RNA, 32 nt, Human
uugaaggaaaugcaguguucugagggccccuu

SEQ ID NO: 538713 - RNA, 32 nt, Human
uugaaggaaguggagacauaaggagagacaaa

SEQ ID NO: 538714 - RNA, 32 nt, Human
uugaaggaaugaacuaacaccaaccaaccaaa

SEQ ID NO: 538715 - RNA, 25 nt, Human
uugaaggacaggagagaugucaggu

SEQ ID NO: 538716 - RNA, 32 nt, Human
uugaaggaccuccuucccccagccucaucacc

SEQ ID NO: 538717 - RNA, 32 nt, Human
uugaaggagagcagcaaaaauguaucaggggu

SEQ ID NO: 538718 - RNA, 32 nt, Human
uugaaggagagggagagggauccuggcccagc

SEQ ID NO: 538719 - RNA, 18 nt, Human
uugaaggagagggugagg

SEQ ID NO: 538720 - RNA, 32 nt, Human
uugaaggaggcacgugggggaggcgggagugg

SEQ ID NO: 538721 - RNA, 32 nt, Human
uugaaggaggcagaagggagagugaugcacga

SEQ ID NO: 538722 - RNA, 32 nt, Human
uugaaggaggcagcgggagcggagagcgcccu

SEQ ID NO: 538723 - RNA, 31 nt, Human
uugaaggaucuacuggagguguuuguaagga

SEQ ID NO: 538724 - RNA, 31 nt, Human
uugaaggcaaugucuuuucucucuguuaaga

SEQ ID NO: 538725 - RNA, 32 nt, Human
uugaaggcagagggguugggauggagcuuuau

SEQ ID NO: 538726 - RNA, 32 nt, Human
uugaaggcaggaguucaagaccagcuugggca

SEQ ID NO: 538727 - RNA, 32 nt, Human
uugaaggcaguuucagaucgccaccuuuugag

SEQ ID NO: 538728 - RNA, 32 nt, Human
uugaaggccagccugcaucucgcggugugugu

SEQ ID NO: 538729 - RNA, 32 nt, Human
uugaaggccagccugggaaacauggcaaaauc

SEQ ID NO: 538730 - RNA, 32 nt, Human
uugaaggccccaaggaguucuugggugugggu

SEQ ID NO: 538731 - RNA, 32 nt, Human
uugaaggccuccaguucccagggggaaggaag

SEQ ID NO: 538732 - RNA, 32 nt, Human
uugaaggccucgcuuaguuguacuggauucuc

SEQ ID NO: 538733 - RNA, 22 nt, Human
uugaaggccuggaauuuucaca

SEQ ID NO: 538734 - RNA, 32 nt, Human
uugaaggcucaagcuucagggagcuggcagag

SEQ ID NO: 538735 - RNA, 32 nt, Human
uugaaggcucccugggacuuaagggcccucag

SEQ ID NO: 538736 - RNA, 32 nt, Human
uugaagggaucuuccagccucugccucccgaa

SEQ ID NO: 538737 - RNA, 32 nt, Human
uugaagggcaagaaauggcgucugcucuggug

SEQ ID NO: 538738 - RNA, 31 nt, Human
uugaaggggacacagucuaggagggggauaa

SEQ ID NO: 538739 - RNA, 32 nt, Human
uugaaggggugauugcugacuagcggggaggg

SEQ ID NO: 538740 - RNA, 31 nt, Human
uugaagguacuuuucugguauuuuaagauuc

SEQ ID NO: 538741 - RNA, 32 nt, Human
uugaaggucuggaucccuuucucugaauggag

SEQ ID NO: 538742 - RNA, 32 nt, Human
uugaaggugaccucugccccagauagguggug

SEQ ID NO: 538743 - RNA, 32 nt, Human
uugaagguggccugagaauggagcuucucuuu

SEQ ID NO: 538744 - RNA, 32 nt, Human
uugaaggugucuuggcaucuucugccuuugcu

SEQ ID NO: 538745 - RNA, 32 nt, Human
uugaagguuccccugagguugcauggugacca

SEQ ID NO: 538746 - RNA, 32 nt, Human
uugaagguucugucaccuuuugcaguggucca

SEQ ID NO: 538747 - RNA, 32 nt, Human
uugaagguuuguccaggcagagcagcuccugc

SEQ ID NO: 538748 - RNA, 32 nt, Human
uugaagguuuguggagagcguggagaaugaug

SEQ ID NO: 538749 - RNA, 32 nt, Human
uugaagguuuugucccuuccucuccuccuucc

SEQ ID NO: 538750 - RNA, 32 nt, Human
uugaaguaacugaaauaaaacucucuccaagc

SEQ ID NO: 538751 - RNA, 32 nt, Human
uugaaguaggaagggagccagagaggccgaug

SEQ ID NO: 538752 - RNA, 32 nt, Human
uugaaguagggaggaggagguugcagugagcu

SEQ ID NO: 538753 - RNA, 32 nt, Human
uugaaguauaucugagggaaaaauaaaugaaa

SEQ ID NO: 538754 - RNA, 32 nt, Human
uugaaguauugauaacaccaaggaacucuauc

SEQ ID NO: 538755 - RNA, 32 nt, Human
uugaagucacacuguaaccucagucuaccccu

SEQ ID NO: 538756 - RNA, 32 nt, Human
uugaagucaggaguucaagaccaaccugggca

SEQ ID NO: 538757 - RNA, 32 nt, Human
uugaagucaggaguucaagaccagccuggcca

SEQ ID NO: 538758 - RNA, 32 nt, Human
uugaagucaggaguuugagaccagccugacca

SEQ ID NO: 538759 - RNA, 32 nt, Human
uugaagucaggaguuugagaccagccuggcca

SEQ ID NO: 538760 - RNA, 32 nt, Human
uugaagucaggaguuugagaccagccuggcug

SEQ ID NO: 538761 - RNA, 32 nt, Human
uugaaguccagccuaagcaacauagugaaacc

SEQ ID NO: 538762 - RNA, 32 nt, Human
uugaaguccuccagacaacccucagauuugau

SEQ ID NO: 538763 - RNA, 21 nt, Human
uugaaguccuccugugccagg

SEQ ID NO: 538764 - RNA, 32 nt, Human
uugaagucgggaguuuaagaccagccuggcca

SEQ ID NO: 538765 - RNA, 32 nt, Human
uugaagugauucucgugucucagucuuccgag

SEQ ID NO: 538766 - RNA, 32 nt, Human
uugaaguggguggaucaccugaggucaggagu

SEQ ID NO: 538767 - RNA, 32 nt, Human
uugaaguguguagaguauauuauaguaacuga

SEQ ID NO: 538768 - RNA, 32 nt, Human
uugaaguucccucugcugagucgcccuugugc

SEQ ID NO: 538769 - RNA, 32 nt, Human
uugaaguucuucucccugguggcuuaagagcc

SEQ ID NO: 538770 - RNA, 32 nt, Human
uugaaguugcaagccuuugucuuacucuuuca

SEQ ID NO: 538771 - RNA, 32 nt, Human
uugaaguuuacauuuccaugugcuguugauca

SEQ ID NO: 538772 - RNA, 32 nt, Human
uugaaguuucaggauuugggugucacaaagga

SEQ ID NO: 538773 - RNA, 32 nt, Human
uugaaguuuucagggauaacauaccugaugga

SEQ ID NO: 538774 - RNA, 32 nt, Human
uugaauaaaagcaguaagacauuuuauuacca

SEQ ID NO: 538775 - RNA, 32 nt, Human
uugaauaaguaguuuucauguuuucaauaugc

SEQ ID NO: 538776 - RNA, 32 nt, Human
uugaauaauguucaugaccacaggcugccaua

SEQ ID NO: 538777 - RNA, 32 nt, Human
uugaauacauguugggaagaaucggugucuua

SEQ ID NO: 538778 - RNA, 32 nt, Human
uugaauaccccagcuucugcagcuucacuugc

SEQ ID NO: 538779 - RNA, 32 nt, Human
uugaauacucgggaaauucaaagggaagugug

SEQ ID NO: 538780 - RNA, 32 nt, Human
uugaauacucugagagaagagagacagacccu

SEQ ID NO: 538781 - RNA, 32 nt, Human
uugaauacuugaaucaugcaggccaauauuau

SEQ ID NO: 538782 - RNA, 32 nt, Human
uugaauacuuguuucuuuagcacuuugaagau

SEQ ID NO: 538783 - RNA, 32 nt, Human
uugaauagguauuguaaauggaagcgcuuacc

SEQ ID NO: 538784 - RNA, 32 nt, Human
uugaauaguauguuacugcagcuuugguaaca

SEQ ID NO: 538785 - RNA, 22 nt, Human
uugaauagugcuuuucucccua

SEQ ID NO: 538786 - RNA, 32 nt, Human
uugaauauacucauguuaagugcaauggcauu

SEQ ID NO: 538787 - RNA, 32 nt, Human
uugaauaucacacugaauacaggugucaccac

SEQ ID NO: 538788 - RNA, 32 nt, Human
uugaauaucugacuucuucugcagccagcugg

SEQ ID NO: 538789 - RNA, 32 nt, Human
uugaauaugagguucaggagauagguucagga

SEQ ID NO: 538790 - RNA, 32 nt, Human
uugaauaugugcacacuggacugugaguuucu

SEQ ID NO: 538791 - RNA, 32 nt, Human
uugaaucaaagcaguuaacuuuaagacugagc

SEQ ID NO: 538792 - RNA, 32 nt, Human
uugaaucacaacaaaauuagauuuguacauag

SEQ ID NO: 538793 - RNA, 32 nt, Human
uugaaucacagaauagcgguaccaugauagaa

SEQ ID NO: 538794 - RNA, 32 nt, Human
uugaaucacuugacaguguuuguuugaauugu

SEQ ID NO: 538795 - RNA, 32 nt, Human
uugaaucagcuugucuaacaagcccauuuuca

SEQ ID NO: 538796 - RNA, 32 nt, Human
uugaauccagcaggccaauagugaaaugugaa

SEQ ID NO: 538797 - RNA, 32 nt, Human
uugaauccaggaggaggagguugcagugagcc

SEQ ID NO: 538798 - RNA, 32 nt, Human
uugaauccaggaggcagagguugcagugagug

SEQ ID NO: 538799 - RNA, 32 nt, Human
uugaauccaggaggcgaagguugcagugagcu

SEQ ID NO: 538800 - RNA, 32 nt, Human
uugaauccaggaggcggagguugcagugaacc

SEQ ID NO: 538801 - RNA, 32 nt, Human
uugaauccaggaggcggagguugcagugagcc

SEQ ID NO: 538802 - RNA, 32 nt, Human
uugaauccaggaguucaagaccagcaugggga

SEQ ID NO: 538803 - RNA, 32 nt, Human
uugaauccaggcauuugagaccagccugggua

SEQ ID NO: 538804 - RNA, 32 nt, Human
uugaaucccaggagacagagguugcagugagc

SEQ ID NO: 538805 - RNA, 32 nt, Human
uugaaucccugaguucuguacuguucuguuuu

SEQ ID NO: 538806 - RNA, 32 nt, Human
uugaauccgggaggcggagguugcagugaacc

SEQ ID NO: 538807 - RNA, 32 nt, Human
uugaauccgggagguggagguugcagugagcc

SEQ ID NO: 538808 - RNA, 32 nt, Human
uugaaucucuacccucucccaccacacaguac

SEQ ID NO: 538809 - RNA, 32 nt, Human
uugaaucucuuucuggcccauccucugcuuca

SEQ ID NO: 538810 - RNA, 32 nt, Human
uugaaucugggagguggagguugcagugagcc

SEQ ID NO: 538811 - RNA, 32 nt, Human
uugaaucugguucauugcguccucguguucuu

SEQ ID NO: 538812 - RNA, 32 nt, Human
uugaaucuuaggaaugaacagugucucaagcu

SEQ ID NO: 538813 - RNA, 32 nt, Human
uugaaucuuuaccagggcuucccaccuccugu

SEQ ID NO: 538814 - RNA, 32 nt, Human
uugaaucuuuccaauaaaccagguuuagacag

SEQ ID NO: 538815 - RNA, 32 nt, Human
uugaaugaaagaagccaggccgaaguuccauu

SEQ ID NO: 538816 - RNA, 32 nt, Human
uugaaugaaaguacaguuccauuuggaagccc

SEQ ID NO: 538817 - RNA, 32 nt, Human
uugaaugaagucuucuuggauuucacccaacu

SEQ ID NO: 538818 - RNA, 32 nt, Human
uugaaugaauacagaugcauuauccagaacug

SEQ ID NO: 538819 - RNA, 32 nt, Human
uugaaugaggaaugggaugaagauagauagug

SEQ ID NO: 538820 - RNA, 32 nt, Human
uugaaugauuggaucaggcccacccagauuac

SEQ ID NO: 538821 - RNA, 31 nt, Human
uugaaugcacuuuugcucauggugaauauag

SEQ ID NO: 538822 - RNA, 31 nt, Human
uugaaugcacuuuuuaugacaaugauucagu

SEQ ID NO: 538823 - RNA, 32 nt, Human
uugaaugcccaggaguuaaaugucuuaagaua

SEQ ID NO: 538824 - RNA, 32 nt, Human
uugaaugccugcugcuuguuuacccuuuggaa

SEQ ID NO: 538825 - RNA, 29 nt, Human
uugaaugccuggggucugccuccgccucu

SEQ ID NO: 538826 - RNA, 32 nt, Human
uugaaugccuuauauuguauacauuccuuuca

SEQ ID NO: 538827 - RNA, 32 nt, Human
uugaaugcucaauuccuuacaaaaucuucauu

SEQ ID NO: 538828 - RNA, 32 nt, Human
uugaaugcugcuuccugcucccuccauggacc

SEQ ID NO: 538829 - RNA, 32 nt, Human
uugaauggcacaaugcuuacagagguagauug

SEQ ID NO: 538830 - RNA, 32 nt, Human
uugaauggcaggcagugauuuggaagugggag

SEQ ID NO: 538831 - RNA, 32 nt, Human
uugaauggccaauccuuccaucuggaggccug

SEQ ID NO: 538832 - RNA, 32 nt, Human
uugaauggcguuuagagaagauagaaaagaau

SEQ ID NO: 538833 - RNA, 32 nt, Human
uugaauggcuggaaccaagaugacagauggag

SEQ ID NO: 538834 - RNA, 32 nt, Human
uugaauggcuggccugugauggauggcuggcc

SEQ ID NO: 538835 - RNA, 32 nt, Human
uugaaugguauaauacaguccucuccggugga

SEQ ID NO: 538836 - RNA, 32 nt, Human
uugaaugguggagggaggcaguggggagaaag

SEQ ID NO: 538837 - RNA, 32 nt, Human
uugaauguauuuuuaugagauuuuaaccagaa

SEQ ID NO: 538838 - RNA, 32 nt, Human
uugaaugucuaacucaaaccucucauuuuugu

SEQ ID NO: 538839 - RNA, 32 nt, Human
uugaaugugccaaacuuuuucguaacuuuuga

SEQ ID NO: 538840 - RNA, 32 nt, Human
uugaauguucaaguaucucauccacucaguuu

SEQ ID NO: 538841 - RNA, 32 nt, Human
uugaauguugaauguuugaauuacagggaaga

SEQ ID NO: 538842 - RNA, 32 nt, Human
uugaauguuuaaauauaugagacacucuuugu

SEQ ID NO: 538843 - RNA, 32 nt, Human
uugaauguuugaauuacagggaagaaaucaag

SEQ ID NO: 538844 - RNA, 32 nt, Human
uugaauguuuuugcccaaaugucuauaccaaa

SEQ ID NO: 538845 - RNA, 32 nt, Human
uugaauuacaucugggcaaucaggagauaauu

SEQ ID NO: 538846 - RNA, 32 nt, Human
uugaauuacgugccccacacuguggcuuagga

SEQ ID NO: 538847 - RNA, 32 nt, Human
uugaauuaggaguauacuuggugaggaaagag

SEQ ID NO: 538848 - RNA, 32 nt, Human
uugaauucaggaggcggagguugcagugagcc

SEQ ID NO: 538849 - RNA, 32 nt, Human
uugaauucaggagguggagguugcagugagcc

SEQ ID NO: 538850 - RNA, 32 nt, Human
uugaauucccggcuggagagcuggcaggaccc

SEQ ID NO: 538851 - RNA, 32 nt, Human
uugaauucccuggauaguccaagcuuugugga

SEQ ID NO: 538852 - RNA, 32 nt, Human
uugaauuccucuuucuuguuuucuuuccuggu

SEQ ID NO: 538853 - RNA, 32 nt, Human
uugaauucgggagguggagguugcagugagcc

SEQ ID NO: 538854 - RNA, 21 nt, Human
uugaauucuaaauucagcaca

SEQ ID NO: 538855 - RNA, 32 nt, Human
uugaauucuaguuuagaguuagcagacuaccc

SEQ ID NO: 538856 - RNA, 32 nt, Human
uugaauucucagauugcccugaauuuugccac

SEQ ID NO: 538857 - RNA, 32 nt, Human
uugaauucugccaaacauuaaaauuagcacua

SEQ ID NO: 538858 - RNA, 32 nt, Human
uugaauucugccucuucuugcucacuguguga

SEQ ID NO: 538859 - RNA, 32 nt, Human
uugaauuggaaagagaagagugaagauccaag

SEQ ID NO: 538860 - RNA, 22 nt, Human
uugaauugggauaaacagagag

SEQ ID NO: 538861 - RNA, 32 nt, Human
uugaauuguauaugcucucacucugaaauucc

SEQ ID NO: 538862 - RNA, 32 nt, Human
uugaauuguauaugugaauuggaaguuauaau

SEQ ID NO: 538863 - RNA, 32 nt, Human
uugaauuguauucccguaauucccagguguug

SEQ ID NO: 538864 - RNA, 32 nt, Human
uugaauugucucucacacuuuucagucaagag

SEQ ID NO: 538865 - RNA, 32 nt, Human
uugaauuguuauuuaaaucaaaccagauguaa

SEQ ID NO: 538866 - RNA, 32 nt, Human
uugaauuuauucugugguaaaucuuuugaguu

SEQ ID NO: 538867 - RNA, 32 nt, Human
uugaauuucuacaaauggugaaauuuaauguu

SEQ ID NO: 538868 - RNA, 32 nt, Human
uugaauuugcccagguaggcgugagagugugg

SEQ ID NO: 538869 - RNA, 32 nt, Human
uugaauuuguaacuuuuuccauuaaacaauaa

SEQ ID NO: 538870 - RNA, 30 nt, Human
uugaauuuuaauaaauaguugaaucagcgu

SEQ ID NO: 538871 - RNA, 32 nt, Human
uugaauuuuacauggcuggagcuagaauuuga

SEQ ID NO: 538872 - RNA, 32 nt, Human
uugaauuuuccucaucuugaaagacucuuggg

SEQ ID NO: 538873 - RNA, 32 nt, Human
uugaauuuuuccugguacgaagacagauauuu

SEQ ID NO: 538874 - RNA, 32 nt, Human
uugacaaaauaacauuugaguauccgauucgc

SEQ ID NO: 538875 - RNA, 32 nt, Human
uugacaaacugcaccauagguguuuuuagacu

SEQ ID NO: 538876 - RNA, 32 nt, Human
uugacaaagaaauauuucaucuggccuuuacu

SEQ ID NO: 538877 - RNA, 32 nt, Human
uugacaaagugacugugcuugauucuauacau

SEQ ID NO: 538878 - RNA, 21 nt, Human
uugacaaaugcugacagggug

SEQ ID NO: 538879 - RNA, 24 nt, Human
uugacaaauuuuauuacuuugcca

SEQ ID NO: 538880 - RNA, 32 nt, Human
uugacaacagcaucuggucuacuagacuuucu

SEQ ID NO: 538881 - RNA, 32 nt, Human
uugacaacaguacauauaucuauuucucuagg

SEQ ID NO: 538882 - RNA, 32 nt, Human
uugacaacauggugaaaccccaucucugguag

SEQ ID NO: 538883 - RNA, 21 nt, Human
uugacaacccugccuuugagg

SEQ ID NO: 538884 - RNA, 32 nt, Human
uugacaacuaucuccuugcccucuggcccugg

SEQ ID NO: 538885 - RNA, 32 nt, Human
uugacaacuucugccacucccaugucagauga

SEQ ID NO: 538886 - RNA, 32 nt, Human
uugacaagauuagcucaagcagauagagucgg

SEQ ID NO: 538887 - RNA, 32 nt, Human
uugacaagcaucaggauuccaggaggauucuu

SEQ ID NO: 538888 - RNA, 32 nt, Human
uugacaagcuguagaacuggauucauuuuuaa

SEQ ID NO: 538889 - RNA, 32 nt, Human
uugacaaguccugcuuggccugauggguggga

SEQ ID NO: 538890 - RNA, 20 nt, Human
uugacaagugcaugauuuca

SEQ ID NO: 538891 - RNA, 32 nt, Human
uugacaauccaaaggugcagaaagcacucuga

SEQ ID NO: 538892 - RNA, 32 nt, Human
uugacaaugaacaucugggcugccuuguagag

SEQ ID NO: 538893 - RNA, 32 nt, Human
uugacaauguuuucuaugaucugaaccuguca

SEQ ID NO: 538894 - RNA, 32 nt, Human
uugacaauuuccaaccucccucauuaccaaga

SEQ ID NO: 538895 - RNA, 32 nt, Human
uugacacaaaagacaggagcaggguccagguu

SEQ ID NO: 538896 - RNA, 32 nt, Human
uugacacaccuuguagucuaaauguucgguau

SEQ ID NO: 538897 - RNA, 32 nt, Human
uugacacacuguuacuguccagucucuacaca

SEQ ID NO: 538898 - RNA, 32 nt, Human
uugacacagaguuuugcucuuguugcccaggc

SEQ ID NO: 538899 - RNA, 22 nt, Human
uugacacauggauuucagcuca

SEQ ID NO: 538900 - RNA, 32 nt, Human
uugacaccaagaaaccacugggcauaaugcuu

SEQ ID NO: 538901 - RNA, 32 nt, Human
uugacaccagaugagccugaaucuaaccaaga

SEQ ID NO: 538902 - RNA, 32 nt, Human
uugacaccagaugagccugaaucuaagcaaga

SEQ ID NO: 538903 - RNA, 32 nt, Human
uugacaccagccugggcaacauagugagaccu

SEQ ID NO: 538904 - RNA, 32 nt, Human
uugacaccagccugggcaacaugguaagaccc

SEQ ID NO: 538905 - RNA, 28 nt, Human
uugacaccaguggaagccucauccucag

SEQ ID NO: 538906 - RNA, 32 nt, Human
uugacacccaccaagcaaaaguuucagccugg

SEQ ID NO: 538907 - RNA, 32 nt, Human
uugacacccaggcuggagugcaguagcacaaa

SEQ ID NO: 538908 - RNA, 32 nt, Human
uugacacccaggcuggagugcaguggugccau

SEQ ID NO: 538909 - RNA, 32 nt, Human
uugacaccggaagaggacggaccuaagauggc

SEQ ID NO: 538910 - RNA, 32 nt, Human
uugacaccggauuuagcucuugucggccuucg

SEQ ID NO: 538911 - RNA, 32 nt, Human
uugacacggaguuucgcucuuguuguccaggc

SEQ ID NO: 538912 - RNA, 32 nt, Human
uugacacucccaccaucuucacccccaccuca

SEQ ID NO: 538913 - RNA, 32 nt, Human
uugacacucuguaucuagcuacucuagugggg

SEQ ID NO: 538914 - RNA, 32 nt, Human
uugacacugacagacccugccuggcaggccug

SEQ ID NO: 538915 - RNA, 32 nt, Human
uugacacuuacugcuagcucugcuuuuuauga

SEQ ID NO: 538916 - RNA, 32 nt, Human
uugacagaaaaucaccagaagccuagagaggc

SEQ ID NO: 538917 - RNA, 32 nt, Human
uugacagaucaucuuggacuucaggaaaugca

SEQ ID NO: 538918 - RNA, 32 nt, Human
uugacagcaccagccaagugaauaggucagag

SEQ ID NO: 538919 - RNA, 32 nt, Human
uugacagcaccuccagcucugcugcuucaaca

SEQ ID NO: 538920 - RNA, 32 nt, Human
uugacagcagagggcguucagggucccucagc

SEQ ID NO: 538921 - RNA, 32 nt, Human
uugacagcaucuuccucccuccuuuaauuaau

SEQ ID NO: 538922 - RNA, 32 nt, Human
uugacagccaugaccaugaaacucacaaggca

SEQ ID NO: 538923 - RNA, 32 nt, Human
uugacagcccccagugcgaaaggcugccagca

SEQ ID NO: 538924 - RNA, 32 nt, Human
uugacagcuaggcuggaggcucaugguuuccu

SEQ ID NO: 538925 - RNA, 32 nt, Human
uugacagcuuggugggaagggaagcacacucu

SEQ ID NO: 538926 - RNA, 32 nt, Human
uugacaggagguuggagggaaagccuuaagcu

SEQ ID NO: 538927 - RNA, 32 nt, Human
uugacaggauuugcuuguguuguuaaaacacu

SEQ ID NO: 538928 - RNA, 32 nt, Human
uugacaggcgccgccucgcccccgggcccuuu

SEQ ID NO: 538929 - RNA, 32 nt, Human
uugacaggcuggagacugagacaggaauugau

SEQ ID NO: 538930 - RNA, 32 nt, Human
uugacagguccugcuucccacuauccuuuucc

SEQ ID NO: 538931 - RNA, 22 nt, Human
uugacagucuaguuucagcaca

SEQ ID NO: 538932 - RNA, 32 nt, Human
uugacaguuguuaacccacuaggcuccuuuga

SEQ ID NO: 538933 - RNA, 32 nt, Human
uugacaguuguuuucuaaacuuccugcugagc

SEQ ID NO: 538934 - RNA, 32 nt, Human
uugacauaagacagcgugauguucuuuggugg

SEQ ID NO: 538935 - RNA, 32 nt, Human
uugacaucaaccugggcaacauggugaccucc

SEQ ID NO: 538936 - RNA, 32 nt, Human
uugacaucaagucgcugacuccugguggcaag

SEQ ID NO: 538937 - RNA, 32 nt, Human
uugacaucaguaguucaagaccagccuggcca

SEQ ID NO: 538938 - RNA, 32 nt, Human
uugacaucagucaggagcugggaguugagacc

SEQ ID NO: 538939 - RNA, 22 nt, Human
uugacaucgacuuucugugcca

SEQ ID NO: 538940 - RNA, 32 nt, Human
uugacaugcugugacccguuucaggcugccca

SEQ ID NO: 538941 - RNA, 32 nt, Human
uugacauggaguuucgcucuugucacccaggc

SEQ ID NO: 538942 - RNA, 32 nt, Human
uugacauguacaguauguuuucaugccguugu

SEQ ID NO: 538943 - RNA, 32 nt, Human
uugacaugugguucauagcuggugaacggugc

SEQ ID NO: 538944 - RNA, 32 nt, Human
uugacauuccuauauuggguuuaggucuaauu

SEQ ID NO: 538945 - RNA, 32 nt, Human
uugacauucuucacugucuguuguuuaccuac

SEQ ID NO: 538946 - RNA, 32 nt, Human
uugacauuucacccuucuuugaggcaugccuu

SEQ ID NO: 538947 - RNA, 32 nt, Human
uugaccaaaacacaguauaaaaacacuggcac

SEQ ID NO: 538948 - RNA, 31 nt, Human
uugaccaaagacaccugaacauuccuggaga

SEQ ID NO: 538949 - RNA, 32 nt, Human
uugaccaaaucccauggagaaaagacaucuca

SEQ ID NO: 538950 - RNA, 32 nt, Human
uugaccaacaugcugaaaccccaucucuauua

SEQ ID NO: 538951 - RNA, 32 nt, Human
uugaccaacauggagaaaccucguuucuacua

SEQ ID NO: 538952 - RNA, 22 nt, Human
uugaccaacauggugaaacccc

SEQ ID NO: 538953 - RNA, 32 nt, Human
uugaccaacauggugaaaccccaucucuacaa

SEQ ID NO: 538954 - RNA, 32 nt, Human
uugaccaaccaaaggaaacaucuuuugacuga

SEQ ID NO: 538955 - RNA, 32 nt, Human
uugaccacagccacuuuagaaaagcuuccugu

SEQ ID NO: 538956 - RNA, 32 nt, Human
uugaccacaguuucagcgaugccucaggucuc

SEQ ID NO: 538957 - RNA, 32 nt, Human
uugaccaccaguacuucuauaaugguagauug

SEQ ID NO: 538958 - RNA, 32 nt, Human
uugaccacugauuugaauuggcugaccgcaug

SEQ ID NO: 538959 - RNA, 20 nt, Human
uugaccagauacugaaggaa

SEQ ID NO: 538960 - RNA, 32 nt, Human
uugaccagaugaaaccucuccaggcaaguggc

SEQ ID NO: 538961 - RNA, 32 nt, Human
uugaccagauguuccaaaauaucugcauccac

SEQ ID NO: 538962 - RNA, 32 nt, Human
uugaccagcacucccucccaaccagagaauua

SEQ ID NO: 538963 - RNA, 32 nt, Human
uugaccaggagugucagcuuuuagaaggauca

SEQ ID NO: 538964 - RNA, 32 nt, Human
uugaccaggcuggagugaaguggugugauccc

SEQ ID NO: 538965 - RNA, 21 nt, Human
uugaccaggcuggagugcagu

SEQ ID NO: 538966 - RNA, 32 nt, Human
uugaccaggcuggagugcaguggugagaucug

SEQ ID NO: 538967 - RNA, 32 nt, Human
uugaccaggcuggucuugaacucuuggcaccc

SEQ ID NO: 538968 - RNA, 32 nt, Human
uugaccaggcuggucuugaacuuuugggcuca

SEQ ID NO: 538969 - RNA, 24 nt, Human
uugaccaggcuuggccuugggcua

SEQ ID NO: 538970 - RNA, 32 nt, Human
uugaccaucacuggcaggaagagcuaaagauc

SEQ ID NO: 538971 - RNA, 32 nt, Human
uugaccaucuggucccaggagcucaggaggag

SEQ ID NO: 538972 - RNA, 32 nt, Human
uugaccaugucuuccuaaccaggcccacacuu

SEQ ID NO: 538973 - RNA, 32 nt, Human
uugacccaagccugugaugacauggugcugau

SEQ ID NO: 538974 - RNA, 32 nt, Human
uugacccacucuccuaucuccagaccuuuacc

SEQ ID NO: 538975 - RNA, 32 nt, Human
uugacccagaccagucccaacgcccagugcgg

SEQ ID NO: 538976 - RNA, 32 nt, Human
uugacccagagccccauccugaugaccucaca

SEQ ID NO: 538977 - RNA, 32 nt, Human
uugacccagauugugugcccugugccaguggg

SEQ ID NO: 538978 - RNA, 32 nt, Human
uugacccagcuuccuucucuccuuuuaccuga

SEQ ID NO: 538979 - RNA, 32 nt, Human
uugacccaggaagcggagguugcagugagcca

SEQ ID NO: 538980 - RNA, 32 nt, Human
uugacccaggaggcagagguugcagugagcca

SEQ ID NO: 538981 - RNA, 32 nt, Human
uugacccaggaggcggagguugcggugacccu

SEQ ID NO: 538982 - RNA, 32 nt, Human
uugacccaggagguggaggucgcagugagccg

SEQ ID NO: 538983 - RNA, 32 nt, Human
uugacccaggaguucaagaccagccuggccaa

SEQ ID NO: 538984 - RNA, 32 nt, Human
uugacccauguacacauacuccuugaaccuaa

SEQ ID NO: 538985 - RNA, 32 nt, Human
uugaccccaggagacguagguuguggugagcu

SEQ ID NO: 538986 - RNA, 32 nt, Human
uugaccccaggaggcgaagauugcagugagcu

SEQ ID NO: 538987 - RNA, 32 nt, Human
uugaccccaggagguggacauugcagugagcc

SEQ ID NO: 538988 - RNA, 32 nt, Human
uugaccccaggaguucaagaccagccugggca

SEQ ID NO: 538989 - RNA, 32 nt, Human
uugaccccaggugguggagguugcagugagcc

SEQ ID NO: 538990 - RNA, 32 nt, Human
uugaccccaucuuuggaaguagcccuuuacca

SEQ ID NO: 538991 - RNA, 32 nt, Human
uugacccccaggcuggagugcaguggcacgau

SEQ ID NO: 538992 - RNA, 32 nt, Human
uugaccccgauaucuacauagaugcuaucggg

SEQ ID NO: 538993 - RNA, 32 nt, Human
uugaccccgggagguggaggcugcagugaguu

SEQ ID NO: 538994 - RNA, 32 nt, Human
uugaccccucagagagcuucagcccagaccug

SEQ ID NO: 538995 - RNA, 32 nt, Human
uugaccccuugcagcuguuggaaucucugcaa

SEQ ID NO: 538996 - RNA, 32 nt, Human
uugacccucuccugaaauuugccaucugacaa

SEQ ID NO: 538997 - RNA, 32 nt, Human
uugacccugaucaacaaugagcagaaacauca

SEQ ID NO: 538998 - RNA, 24 nt, Human
uugacccugauggggacccguagg

SEQ ID NO: 538999 - RNA, 32 nt, Human
uugacccugcauugcaaaacacagguucgggu

SEQ ID NO: 539000 - RNA, 32 nt, Human
uugacccuuccccucccugggaguacacugag

SEQ ID NO: 539001 - RNA, 32 nt, Human
uugaccgccuucucacugggccuguagugcgg

SEQ ID NO: 539002 - RNA, 23 nt, Human
uugaccgcucuuccuuuccugga

SEQ ID NO: 539003 - RNA, 32 nt, Human
uugaccgcuguucacuguccacgugaucaguu

SEQ ID NO: 539004 - RNA, 32 nt, Human
uugaccgggagacagagguugcagugagcuga

SEQ ID NO: 539005 - RNA, 32 nt, Human
uugaccguacucucacauguggcaaaauaugg

SEQ ID NO: 539006 - RNA, 32 nt, Human
uugaccguggcaaaguguacaguagauuuuca

SEQ ID NO: 539007 - RNA, 32 nt, Human
uugaccuacuuugguaguggaauagugaauac

SEQ ID NO: 539008 - RNA, 31 nt, Human
uugaccuagauaaauacacuuugagaaaucc

SEQ ID NO: 539009 - RNA, 32 nt, Human
uugaccuauaucuccccauuuccucuccuucc

SEQ ID NO: 539010 - RNA, 32 nt, Human
uugaccucagguaguccgccuuccucggccuc

SEQ ID NO: 539011 - RNA, 32 nt, Human
uugaccucaggugauccacccaccucagccuc

SEQ ID NO: 539012 - RNA, 32 nt, Human
uugaccucaggugauccacccaccucggccuc

SEQ ID NO: 539013 - RNA, 32 nt, Human
uugaccucaggugaucugcccaccucggccuc

SEQ ID NO: 539014 - RNA, 32 nt, Human
uugaccucauuuuccccaucugaaaagagagg

SEQ ID NO: 539015 - RNA, 32 nt, Human
uugaccucccaaagugccgggauuacaggcau

SEQ ID NO: 539016 - RNA, 32 nt, Human
uugaccucccaaagugccgggauugcaggcau

SEQ ID NO: 539017 - RNA, 32 nt, Human
uugaccucccaaagugcugggaugacaggcgu

SEQ ID NO: 539018 - RNA, 32 nt, Human
uugaccucccaaagugcugggauuacaggcau

SEQ ID NO: 539019 - RNA, 32 nt, Human
uugaccucccaaagugcugggauuacaggcgu

SEQ ID NO: 539020 - RNA, 32 nt, Human
uugaccucccaaagugcugggauuacagggga

SEQ ID NO: 539021 - RNA, 32 nt, Human
uugaccucccaaagugcugggauuacuagacg

SEQ ID NO: 539022 - RNA, 32 nt, Human
uugaccucccagacccaagugauccucccacc

SEQ ID NO: 539023 - RNA, 32 nt, Human
uugaccucccagagggcugaacucuuucaacu

SEQ ID NO: 539024 - RNA, 32 nt, Human
uugaccuccuaaauuguugggauuacaggugu

SEQ ID NO: 539025 - RNA, 32 nt, Human
uugaccuccuggcaaauugcugcgucuuucca

SEQ ID NO: 539026 - RNA, 32 nt, Human
uugaccucgggugauccacccaccucagccuc

SEQ ID NO: 539027 - RNA, 32 nt, Human
uugaccucuagaccccaagaugugaacagugc

SEQ ID NO: 539028 - RNA, 32 nt, Human
uugaccucuguccugggcuccugggccaggug

SEQ ID NO: 539029 - RNA, 32 nt, Human
uugaccugaccuggccccuucuugcugggccc

SEQ ID NO: 539030 - RNA, 32 nt, Human
uugaccugacuuuagaaccugaccucaaggau

SEQ ID NO: 539031 - RNA, 32 nt, Human
uugaccugcccacucuccacacugccucaccu

SEQ ID NO: 539032 - RNA, 31 nt, Human
uugaccugccuuuucugacuccgggacgagc

SEQ ID NO: 539033 - RNA, 32 nt, Human
uugaccugcgcaaugcagaggcugcagguagu

SEQ ID NO: 539034 - RNA, 32 nt, Human
uugaccugcuucugucacagcacugaucacac

SEQ ID NO: 539035 - RNA, 32 nt, Human
uugaccuggcaggcggagguugcagugagccg

SEQ ID NO: 539036 - RNA, 22 nt, Human
uugaccuggccucucccccaca

SEQ ID NO: 539037 - RNA, 29 nt, Human
uugaccuggcugcaucuuuccucagcucu

SEQ ID NO: 539038 - RNA, 32 nt, Human
uugaccuggcuggucucgaacuccugaacgca

SEQ ID NO: 539039 - RNA, 32 nt, Human
uugaccugggaggcggagauugcggugagccu

SEQ ID NO: 539040 - RNA, 32 nt, Human
uugaccugguggauguggcugcaguccagaga

SEQ ID NO: 539041 - RNA, 32 nt, Human
uugaccugguugcagaacauggcaggcaagca

SEQ ID NO: 539042 - RNA, 32 nt, Human
uugaccuuaugagaaacugcaugugggcuaug

SEQ ID NO: 539043 - RNA, 32 nt, Human
uugaccuucaguuuaagaaaaccccucuaaga

SEQ ID NO: 539044 - RNA, 32 nt, Human
uugaccuucccaagguuacucagcagcagaga

SEQ ID NO: 539045 - RNA, 32 nt, Human
uugaccuucucccagccuccugucuccuaccu

SEQ ID NO: 539046 - RNA, 22 nt, Human
uugaccuugauugacugucagg

SEQ ID NO: 539047 - RNA, 32 nt, Human
uugaccuuggcacacacugcagagccacaggg

SEQ ID NO: 539048 - RNA, 18 nt, Human
uugaccuuuuggggccuu

SEQ ID NO: 539049 - RNA, 32 nt, Human
uugacgaaugcacagaggcgcuggcagaacca

SEQ ID NO: 539050 - RNA, 32 nt, Human
uugacgaccaccaugacugagaucacugcuga

SEQ ID NO: 539051 - RNA, 32 nt, Human
uugacgaggucugagcgaccauggaccggccg

SEQ ID NO: 539052 - RNA, 32 nt, Human
uugacgcagccccuacacuccaucccaaccaa

SEQ ID NO: 539053 - RNA, 32 nt, Human
uugacgccaagaguucgagaccagccugggca

SEQ ID NO: 539054 - RNA, 32 nt, Human
uugacgcucugggccgccaccuccgcggaccc

SEQ ID NO: 539055 - RNA, 32 nt, Human
uugacggcguguguuggucccaucucucagac

SEQ ID NO: 539056 - RNA, 32 nt, Human
uugacggcucuggacccaggacagacagacag

SEQ ID NO: 539057 - RNA, 32 nt, Human
uugacggcuuugccuaggucccuccgcccgua

SEQ ID NO: 539058 - RNA, 32 nt, Human
uugacgggaagcggagguugcagugagccgag

SEQ ID NO: 539059 - RNA, 32 nt, Human
uugacgggcacugcgggugaggaugagaaguc

SEQ ID NO: 539060 - RNA, 32 nt, Human
uugacgggccuggaggguauuaaagagacaca

SEQ ID NO: 539061 - RNA, 32 nt, Human
uugacgggcugucuuggcucuggaauucaugc

SEQ ID NO: 539062 - RNA, 32 nt, Human
uugacgguggugcugaggcaugaaaggcuagu

SEQ ID NO: 539063 - RNA, 32 nt, Human
uugacgucaggaguucgagaccagccuggcca

SEQ ID NO: 539064 - RNA, 32 nt, Human
uugacgucagugugggguuacucagcuaaggc

SEQ ID NO: 539065 - RNA, 32 nt, Human
uugacguccugggacacaaagcugaauuggga

SEQ ID NO: 539066 - RNA, 32 nt, Human
uugacguggagcugcucaacuuagagugaagg

SEQ ID NO: 539067 - RNA, 27 nt, Human
uugacguucaauaaaacuguugaaucu

SEQ ID NO: 539068 - RNA, 32 nt, Human
uugacguuguguccuccuccccuggacaaucu

SEQ ID NO: 539069 - RNA, 32 nt, Human
uugacguuuuaaacuccuaggcccaggaugag

SEQ ID NO: 539070 - RNA, 32 nt, Human
uugacguuuuggugggcuggccgaagaaggag

SEQ ID NO: 539071 - RNA, 32 nt, Human
uugacuaaacuuuuauccuuccuuuaacuuaa

SEQ ID NO: 539072 - RNA, 32 nt, Human
uugacuaaucuugccuggguuuguguaggucu

SEQ ID NO: 539073 - RNA, 32 nt, Human
uugacuacaagugcucacagacuagaacuuaa

SEQ ID NO: 539074 - RNA, 32 nt, Human
uugacuacaagugggccgugcagcugguuccu

SEQ ID NO: 539075 - RNA, 32 nt, Human
uugacuacagaggauuuggggacucuacaggu

SEQ ID NO: 539076 - RNA, 32 nt, Human
uugacuagaaacugccuuuuucuccacuucau

SEQ ID NO: 539077 - RNA, 32 nt, Human
uugacuagagguuaccaccauugugaucaaga

SEQ ID NO: 539078 - RNA, 32 nt, Human
uugacuagcccagcucugggguccccauguaa

SEQ ID NO: 539079 - RNA, 32 nt, Human
uugacuagguaguggcgaaguucuggaagcac

SEQ ID NO: 539080 - RNA, 32 nt, Human
uugacuagguuaucaaaauuaaccucaccaau

SEQ ID NO: 539081 - RNA, 32 nt, Human
uugacuagucaaggacugggaacgugccaggg

SEQ ID NO: 539082 - RNA, 32 nt, Human
uugacuauuuaaaggauaaaguaguauuuaau

SEQ ID NO: 539083 - RNA, 32 nt, Human
uugacuauuuguguagcaaacagccucuuagg

SEQ ID NO: 539084 - RNA, 32 nt, Human
uugacucaaaauaucuaugaaccaaaggauau

SEQ ID NO: 539085 - RNA, 32 nt, Human
uugacucaaagaggaaggauggaaaacaucuc

SEQ ID NO: 539086 - RNA, 32 nt, Human
uugacucacuacaaccuccgccucccagguuc

SEQ ID NO: 539087 - RNA, 32 nt, Human
uugacucacugcaacaucugccucccggguuc

SEQ ID NO: 539088 - RNA, 32 nt, Human
uugacucacugcaaccuccaccucccagguuc

SEQ ID NO: 539089 - RNA, 32 nt, Human
uugacucacugcaaccuccgccucacagcuuc

SEQ ID NO: 539090 - RNA, 32 nt, Human
uugacucacugcaaccuccgccucccagguuc

SEQ ID NO: 539091 - RNA, 32 nt, Human
uugacucacugcaaccuccgccuccuggguuc

SEQ ID NO: 539092 - RNA, 32 nt, Human
uugacucacugcaaccucugccucccagguuu

SEQ ID NO: 539093 - RNA, 32 nt, Human
uugacucacugcaaccucugccucucggguuc

SEQ ID NO: 539094 - RNA, 32 nt, Human
uugacucacugcaaucuccaccucccacaggu

SEQ ID NO: 539095 - RNA, 32 nt, Human
uugacucacugcaauucugccuccuggguuca

SEQ ID NO: 539096 - RNA, 32 nt, Human
uugacucacugcagccucaaccucccaggcuc

SEQ ID NO: 539097 - RNA, 32 nt, Human
uugacucaguacuauuucuuuucacuuugaaa

SEQ ID NO: 539098 - RNA, 32 nt, Human
uugacucagugaugcagaaccuuucagaguua

SEQ ID NO: 539099 - RNA, 32 nt, Human
uugacucagugcucccuuccucuccucuccuu

SEQ ID NO: 539100 - RNA, 32 nt, Human
uugacucauuggacuguuaugaggcuugugcc

SEQ ID NO: 539101 - RNA, 32 nt, Human
uugacuccaccaggagcggcuacguuguaacc

SEQ ID NO: 539102 - RNA, 32 nt, Human
uugacuccagagacucaggauaggagggcagc

SEQ ID NO: 539103 - RNA, 32 nt, Human
uugacuccaggaggcgcaggcugcagugagcu

SEQ ID NO: 539104 - RNA, 32 nt, Human
uugacuccaggcugggcgauuccgaugcugac

SEQ ID NO: 539105 - RNA, 32 nt, Human
uugacuccaguauugggcaggugccuacagac

SEQ ID NO: 539106 - RNA, 32 nt, Human
uugacuccaugcuucuuagccugguggcagug

SEQ ID NO: 539107 - RNA, 32 nt, Human
uugacuccuccagggcccgggcuaagggcaca

SEQ ID NO: 539108 - RNA, 32 nt, Human
uugacucgcugcagucuccaccuccaggauuc

SEQ ID NO: 539109 - RNA, 32 nt, Human
uugacucgcugcuggggguccugcucuucguc

SEQ ID NO: 539110 - RNA, 32 nt, Human
uugacucucucucuucccgugccuguacaaag

SEQ ID NO: 539111 - RNA, 32 nt, Human
uugacucuugacuucucuggugcaagaccuca

SEQ ID NO: 539112 - RNA, 32 nt, Human
uugacugaaaguaccaggaagauacugaauac

SEQ ID NO: 539113 - RNA, 32 nt, Human
uugacugagcucaucagugaaauguugaauag

SEQ ID NO: 539114 - RNA, 32 nt, Human
uugacugaugaaugaagagcguuucuaauaaa

SEQ ID NO: 539115 - RNA, 32 nt, Human
uugacugaugauuuuccuuuuucuucgcugga

SEQ ID NO: 539116 - RNA, 21 nt, Human
uugacugccaagguuuccaag

SEQ ID NO: 539117 - RNA, 32 nt, Human
uugacugccacauauggaccccaaaagaucuc

SEQ ID NO: 539118 - RNA, 32 nt, Human
uugacugccaggcugggugcaguggcucacac

SEQ ID NO: 539119 - RNA, 32 nt, Human
uugacugccauauuuuccuuccuuccuuccuu

SEQ ID NO: 539120 - RNA, 24 nt, Human
uugacugccugggagguccccaag

SEQ ID NO: 539121 - RNA, 32 nt, Human
uugacugcucuguuugggugggagaagauucu

SEQ ID NO: 539122 - RNA, 32 nt, Human
uugacuggaccacugccaccucuugguagcca

SEQ ID NO: 539123 - RNA, 32 nt, Human
uugacuggaccgcugccaccucuugguagcca

SEQ ID NO: 539124 - RNA, 32 nt, Human
uugacuggaggcggagguugcagugagccgag

SEQ ID NO: 539125 - RNA, 32 nt, Human
uugacuggcaaaacaggagcagggggagccca

SEQ ID NO: 539126 - RNA, 32 nt, Human
uugacugggaaugggucaaaggcggugcagga

SEQ ID NO: 539127 - RNA, 32 nt, Human
uugacugggcuguggaggugggcaugugggcc

SEQ ID NO: 539128 - RNA, 32 nt, Human
uugacuguagccacagcugcuguucucaggac

SEQ ID NO: 539129 - RNA, 32 nt, Human
uugacuguauucacauaaauggugcuaaaaca

SEQ ID NO: 539130 - RNA, 32 nt, Human
uugacugucuagccacucccucccagaaaaac

SEQ ID NO: 539131 - RNA, 32 nt, Human
uugacuguuauuucuuuucuuccugcuuuccu

SEQ ID NO: 539132 - RNA, 32 nt, Human
uugacuguuccacagcuacuucccaggacccc

SEQ ID NO: 539133 - RNA, 32 nt, Human
uugacuuaaaaagaggaguggggaauauucug

SEQ ID NO: 539134 - RNA, 32 nt, Human
uugacuuagaagcaauagggggcagcaggcca

SEQ ID NO: 539135 - RNA, 32 nt, Human
uugacuuauacaacauagucagucuagaguug

SEQ ID NO: 539136 - RNA, 26 nt, Human
uugacuuauugagaaauaaugcagug

SEQ ID NO: 539137 - RNA, 32 nt, Human
uugacuucaagaugccucuucuaccucuucca

SEQ ID NO: 539138 - RNA, 32 nt, Human
uugacuucacaguaaucaguaguuuuauaggu

SEQ ID NO: 539139 - RNA, 32 nt, Human
uugacuucauccugucauuccagccugggguc

SEQ ID NO: 539140 - RNA, 32 nt, Human
uugacuucaugaucugcauccuaggcacacug

SEQ ID NO: 539141 - RNA, 32 nt, Human
uugacuuccaauggcaaaccugggugaucggg

SEQ ID NO: 539142 - RNA, 32 nt, Human
uugacuucccaaagugcugggauuacaggcgg

SEQ ID NO: 539143 - RNA, 32 nt, Human
uugacuucccaaagugcugggauuaugggcgg

SEQ ID NO: 539144 - RNA, 32 nt, Human
uugacuuccccuucagcuucagaccccuuccc

SEQ ID NO: 539145 - RNA, 32 nt, Human
uugacuuccucucuuuuuauuuggaggcacuu

SEQ ID NO: 539146 - RNA, 32 nt, Human
uugacuuccucuuccuagacuugaggccuuuu

SEQ ID NO: 539147 - RNA, 32 nt, Human
uugacuuccucuuccuucugauucugccugaa

SEQ ID NO: 539148 - RNA, 32 nt, Human
uugacuuccucuuuuccuaauugaauaaccug

SEQ ID NO: 539149 - RNA, 32 nt, Human
uugacuucucaaaaucaauauacuugacuucc

SEQ ID NO: 539150 - RNA, 32 nt, Human
uugacuucuugugcaacugcucaggccuugau

SEQ ID NO: 539151 - RNA, 32 nt, Human
uugacuucuuuucuaaauauuuacauggauuu

SEQ ID NO: 539152 - RNA, 19 nt, Human
uugacuugaggcggcacag

SEQ ID NO: 539153 - RNA, 23 nt, Human
uugacuugcaguuccgggcugug

SEQ ID NO: 539154 - RNA, 21 nt, Human
uugacuuggauguugugggug

SEQ ID NO: 539155 - RNA, 32 nt, Human
uugacuugucuuuuuaaaugcuuuaucuuuuu

SEQ ID NO: 539156 - RNA, 32 nt, Human
uugacuugugggcucccacaggagucauggug

SEQ ID NO: 539157 - RNA, 32 nt, Human
uugacuuuaccaaaaccgucaggauuugaauc

SEQ ID NO: 539158 - RNA, 32 nt, Human
uugacuuucacaccucauauaaucagaucuau

SEQ ID NO: 539159 - RNA, 32 nt, Human
uugacuuucucuucuccucgauccucaugguc

SEQ ID NO: 539160 - RNA, 32 nt, Human
uugacuuucugugagcccccagcgaggggagg

SEQ ID NO: 539161 - RNA, 32 nt, Human
uugacuuugcaauaacguggcagguaucugau

SEQ ID NO: 539162 - RNA, 32 nt, Human
uugacuuugcagcugguugagaacagguugga

SEQ ID NO: 539163 - RNA, 32 nt, Human
uugacuuugccaccgucucucuucuggguucc

SEQ ID NO: 539164 - RNA, 32 nt, Human
uugacuuuggggaaagaaaaggaagcugcagg

SEQ ID NO: 539165 - RNA, 32 nt, Human
uugacuuuucuuucuaguccuggggccuagau

SEQ ID NO: 539166 - RNA, 32 nt, Human
uugacuuuuugcagcucggcugugccucaucu

SEQ ID NO: 539167 - RNA, 32 nt, Human
uugagaaaacauuagaacaaauuuuauuauuu

SEQ ID NO: 539168 - RNA, 32 nt, Human
uugagaaaaggcagaguucucagguccuagga

SEQ ID NO: 539169 - RNA, 32 nt, Human
uugagaaacuuaggacagaagccuaccucauc

SEQ ID NO: 539170 - RNA, 32 nt, Human
uugagaaaggaugcaccaaggccaggcuuacc

SEQ ID NO: 539171 - RNA, 32 nt, Human
uugagaaagugagauguaggauucaaggaaga

SEQ ID NO: 539172 - RNA, 32 nt, Human
uugagaacaaauguacaaauauaaagaaagua

SEQ ID NO: 539173 - RNA, 32 nt, Human
uugagaacaacaaaagaccuuucauuauuuac

SEQ ID NO: 539174 - RNA, 32 nt, Human
uugagaacaaccugggcaacauggcgaaaccc

SEQ ID NO: 539175 - RNA, 32 nt, Human
uugagaacaacucaugaucacaauucauaaaa

SEQ ID NO: 539176 - RNA, 32 nt, Human
uugagaacagccuggccaacacggugaaaccc

SEQ ID NO: 539177 - RNA, 32 nt, Human
uugagaacagccuggccaacauagugaaacuc

SEQ ID NO: 539178 - RNA, 32 nt, Human
uugagaacagccuggccaacauggugaaaccc

SEQ ID NO: 539179 - RNA, 32 nt, Human
uugagaacagccuggccaacauggugaaaccu

SEQ ID NO: 539180 - RNA, 32 nt, Human
uugagaacagccuggccaacauggugaaacuc

SEQ ID NO: 539181 - RNA, 32 nt, Human
uugagaacagccuggccaacgugaugaaaccc

SEQ ID NO: 539182 - RNA, 32 nt, Human
uugagaacaggccagucuugaccccaauacag

SEQ ID NO: 539183 - RNA, 32 nt, Human
uugagaaccaaaaucaagaggaacagaaaucu

SEQ ID NO: 539184 - RNA, 32 nt, Human
uugagaacccauguauggguugcagugagccg

SEQ ID NO: 539185 - RNA, 32 nt, Human
uugagaaccccaagacagagacagugagccag

SEQ ID NO: 539186 - RNA, 32 nt, Human
uugagaacccccagaccuacauaaggggaacc

SEQ ID NO: 539187 - RNA, 32 nt, Human
uugagaacguuauuuugcuaguucuuaagguu

SEQ ID NO: 539188 - RNA, 32 nt, Human
uugagaagacuccugggcuucagccucuccca

SEQ ID NO: 539189 - RNA, 32 nt, Human
uugagaagaggaagaagauggaagcugauggg

SEQ ID NO: 539190 - RNA, 32 nt, Human
uugagaagcauaacuuuaugacaacuuagggg

SEQ ID NO: 539191 - RNA, 32 nt, Human
uugagaagcguuuuuaaccuguuuuguuaaug

SEQ ID NO: 539192 - RNA, 32 nt, Human
uugagaagcuaagaugguggauggugcagaaa

SEQ ID NO: 539193 - RNA, 32 nt, Human
uugagaagcuucucacaagugaugcacuuuaa

SEQ ID NO: 539194 - RNA, 32 nt, Human
uugagaaggaaagaagccuggagcagccucuc

SEQ ID NO: 539195 - RNA, 32 nt, Human
uugagaaggagagaaaaagguggcaggaauuu

SEQ ID NO: 539196 - RNA, 32 nt, Human
uugagaaggagagaaagugggugagaugcugg

SEQ ID NO: 539197 - RNA, 32 nt, Human
uugagaaggcguuucgcucuuguugcccaggc

SEQ ID NO: 539198 - RNA, 32 nt, Human
uugagaagggagggaggaagacaggaaggaag

SEQ ID NO: 539199 - RNA, 32 nt, Human
uugagaaggugaagcaggggaguucugaagag

SEQ ID NO: 539200 - RNA, 32 nt, Human
uugagaagugucuguucauguccuuugcccau

SEQ ID NO: 539201 - RNA, 32 nt, Human
uugagaauaggaguucaagaccagccugggca

SEQ ID NO: 539202 - RNA, 32 nt, Human
uugagaaucacuuguuaguucuugguaggaau

SEQ ID NO: 539203 - RNA, 32 nt, Human
uugagaaugcccugcccuguguggaagccuga

SEQ ID NO: 539204 - RNA, 32 nt, Human
uugagaauggguuuccaggaaacccguugucu

SEQ ID NO: 539205 - RNA, 32 nt, Human
uugagaauucuuucccccucuccugguuucca

SEQ ID NO: 539206 - RNA, 32 nt, Human
uugagacaaacagugagcgggcaccaacaggc

SEQ ID NO: 539207 - RNA, 32 nt, Human
uugagacaaaguuucgcucuuguugcccaggc

SEQ ID NO: 539208 - RNA, 32 nt, Human
uugagacaagggaggcaggggacuuaugcauc

SEQ ID NO: 539209 - RNA, 31 nt, Human
uugagacaaguguucaaacagaaagacgcuu

SEQ ID NO: 539210 - RNA, 32 nt, Human
uugagacacaguuucgcucuuauugcccaggc

SEQ ID NO: 539211 - RNA, 32 nt, Human
uugagacacaguuugcucugucacccaggcug

SEQ ID NO: 539212 - RNA, 32 nt, Human
uugagacaccuacaggguguagaaaagaagaa

SEQ ID NO: 539213 - RNA, 32 nt, Human
uugagacacugucaagggaauggucuuccuua

SEQ ID NO: 539214 - RNA, 32 nt, Human
uugagacagaauuuugcucuuguugcccaggc

SEQ ID NO: 539215 - RNA, 32 nt, Human
uugagacagagucucacucuuguugcccaagc

SEQ ID NO: 539216 - RNA, 32 nt, Human
uugagacagagucugguucuguuucccaggcu

SEQ ID NO: 539217 - RNA, 32 nt, Human
uugagacagaguuucacucuuguugcccacgc

SEQ ID NO: 539218 - RNA, 32 nt, Human
uugagacagaguuucacucuuguugcccaggc

SEQ ID NO: 539219 - RNA, 29 nt, Human
uugagacagaguuucacucuuguugccug

SEQ ID NO: 539220 - RNA, 32 nt, Human
uugagacagaguuucacucuuguuguccaguc

SEQ ID NO: 539221 - RNA, 32 nt, Human
uugagacagaguuucacuuuuguugcccaggc

SEQ ID NO: 539222 - RNA, 32 nt, Human
uugagacagaguuucauucuuguugcccaggg

SEQ ID NO: 539223 - RNA, 32 nt, Human
uugagacagaguuucgcacuucuugcccaggc

SEQ ID NO: 539224 - RNA, 32 nt, Human
uugagacagaguuucgcucuaguugcccacac

SEQ ID NO: 539225 - RNA, 32 nt, Human
uugagacagaguuucgcucuugucacccaggc

SEQ ID NO: 539226 - RNA, 32 nt, Human
uugagacagaguuucgcucuuguugcccaagc

SEQ ID NO: 539227 - RNA, 32 nt, Human
uugagacagaguuucgcucuuguugcccagcc

SEQ ID NO: 539228 - RNA, 32 nt, Human
uugagacagaguuucgcucuuguugcccaggc

SEQ ID NO: 539229 - RNA, 32 nt, Human
uugagacagaguuucgcucuuguugcugaggc

SEQ ID NO: 539230 - RNA, 32 nt, Human
uugagacagaguuucgcuuugucgcccaggcu

SEQ ID NO: 539231 - RNA, 32 nt, Human
uugagacagaguuucgcuuuuguugcccgggc

SEQ ID NO: 539232 - RNA, 32 nt, Human
uugagacagaguuuggcucuuguugcccaggc

SEQ ID NO: 539233 - RNA, 32 nt, Human
uugagacagaguuuugcccuuguugcccaggc

SEQ ID NO: 539234 - RNA, 32 nt, Human
uugagacagaguuuugcucuugucacccaggc

SEQ ID NO: 539235 - RNA, 32 nt, Human
uugagacagaguuuugcucuugucaccuaggc

SEQ ID NO: 539236 - RNA, 32 nt, Human
uugagacagaguuuugcucuuguugcccaggc

SEQ ID NO: 539237 - RNA, 32 nt, Human
uugagacagaguuuugcucuuguugcccaggu

SEQ ID NO: 539238 - RNA, 32 nt, Human
uugagacagaguuuugcucuuguuguccaggc

SEQ ID NO: 539239 - RNA, 32 nt, Human
uugagacagcacagcagccacuccaacaccag

SEQ ID NO: 539240 - RNA, 32 nt, Human
uugagacagcauucccaggaacaaaggcuggg

SEQ ID NO: 539241 - RNA, 32 nt, Human
uugagacagcgggagagcagagcacuggugcc

SEQ ID NO: 539242 - RNA, 32 nt, Human
uugagacaggagaccuggcacuggaugcagaa

SEQ ID NO: 539243 - RNA, 32 nt, Human
uugagacaggccuggccaaccuggugacucua

SEQ ID NO: 539244 - RNA, 32 nt, Human
uugagacaggguuucgcuguguugcuccagcu

SEQ ID NO: 539245 - RNA, 32 nt, Human
uugagacaggguuuugcucuuguugcccagcc

SEQ ID NO: 539246 - RNA, 32 nt, Human
uugagacagugcacaugaacugucuuuuaaug

SEQ ID NO: 539247 - RNA, 32 nt, Human
uugagacaguggguuccucagguccaacaaaa

SEQ ID NO: 539248 - RNA, 32 nt, Human
uugagaccaacaugggcaacauggugaaacac

SEQ ID NO: 539249 - RNA, 32 nt, Human
uugagaccaaccuagucaacauggugaaaccc

SEQ ID NO: 539250 - RNA, 32 nt, Human
uugagaccaaccuggccaacacagugagaccc

SEQ ID NO: 539251 - RNA, 32 nt, Human
uugagaccaaccuggccaacaugauaaaaccc

SEQ ID NO: 539252 - RNA, 32 nt, Human
uugagaccaaccuggccaacauggugaaaccc

SEQ ID NO: 539253 - RNA, 32 nt, Human
uugagaccaaccuggccaacauggugaaaccu

SEQ ID NO: 539254 - RNA, 32 nt, Human
uugagaccaaccuggccaacauguugaaaccu

SEQ ID NO: 539255 - RNA, 32 nt, Human
uugagaccaaccugguuaacauggugaaaccc

SEQ ID NO: 539256 - RNA, 32 nt, Human
uugagaccaacuuggccaacauggugaaaccc

SEQ ID NO: 539257 - RNA, 32 nt, Human
uugagaccaagaguucaagaccagccuggcca

SEQ ID NO: 539258 - RNA, 32 nt, Human
uugagaccacagaaguuauggaagacaggcag

SEQ ID NO: 539259 - RNA, 32 nt, Human
uugagaccacccuggccaacauggugaaaccc

SEQ ID NO: 539260 - RNA, 32 nt, Human
uugagaccacccuggccaacauggugaaaccu

SEQ ID NO: 539261 - RNA, 32 nt, Human
uugagaccagacugggcaacauggugagacuc

SEQ ID NO: 539262 - RNA, 32 nt, Human
uugagaccagcaugaccaacauggcgaaaccc

SEQ ID NO: 539263 - RNA, 32 nt, Human
uugagaccagccaggccaacauggugaaacuu

SEQ ID NO: 539264 - RNA, 32 nt, Human
uugagaccagcccaggcaacauggugaaaccc

SEQ ID NO: 539265 - RNA, 32 nt, Human
uugagaccagcccggacaacauggcgaaaccu

SEQ ID NO: 539266 - RNA, 32 nt, Human
uugagaccagcccggccaacauggugaaaccc

SEQ ID NO: 539267 - RNA, 32 nt, Human
uugagaccagccgggccaacauggugcaaccu

SEQ ID NO: 539268 - RNA, 32 nt, Human
uugagaccagccuagacaacauggugaaaccu

SEQ ID NO: 539269 - RNA, 32 nt, Human
uugagaccagccuagccaacaugcugaaacuc

SEQ ID NO: 539270 - RNA, 32 nt, Human
uugagaccagccuagccaacauggugaaaucc

SEQ ID NO: 539271 - RNA, 32 nt, Human
uugagaccagccuaggcaacacagugaaaccc

SEQ ID NO: 539272 - RNA, 32 nt, Human
uugagaccagccuaggugacaaagugagaccc

SEQ ID NO: 539273 - RNA, 32 nt, Human
uugagaccagccucaucaacacagugaaacuc

SEQ ID NO: 539274 - RNA, 32 nt, Human
uugagaccagccuccuggccaacauggugaaa

SEQ ID NO: 539275 - RNA, 32 nt, Human
uugagaccagccucgccaacauggugaaaccc

SEQ ID NO: 539276 - RNA, 32 nt, Human
uugagaccagccucgccaacauggugagaccc

SEQ ID NO: 539277 - RNA, 32 nt, Human
uugagaccagccucggcaacauggcaaaaucu

SEQ ID NO: 539278 - RNA, 32 nt, Human
uugagaccagccugaacaacauggugaaaccc

SEQ ID NO: 539279 - RNA, 32 nt, Human
uugagaccagccugacauggugaaaccccauc

SEQ ID NO: 539280 - RNA, 32 nt, Human
uugagaccagccugaccaaaauggugaaaccc

SEQ ID NO: 539281 - RNA, 32 nt, Human
uugagaccagccugaccaaacauggcgaaacc

SEQ ID NO: 539282 - RNA, 32 nt, Human
uugagaccagccugaccaacauggagaaaccc

SEQ ID NO: 539283 - RNA, 32 nt, Human
uugagaccagccugaccaacauggagaaaccu

SEQ ID NO: 539284 - RNA, 32 nt, Human
uugagaccagccugaccaacauggcaaaaccc

SEQ ID NO: 539285 - RNA, 32 nt, Human
uugagaccagccugaccaacauggugaaaccc

SEQ ID NO: 539286 - RNA, 32 nt, Human
uugagaccagccugaccaacauggugaaaccu

SEQ ID NO: 539287 - RNA, 32 nt, Human
uugagaccagccugaccaacauggugaaacuc

SEQ ID NO: 539288 - RNA, 32 nt, Human
uugagaccagccugaccaacauggugaaaucc

SEQ ID NO: 539289 - RNA, 32 nt, Human
uugagaccagccugaccaacauggugaaauga

SEQ ID NO: 539290 - RNA, 32 nt, Human
uugagaccagccugaccaacguggugaaaccc

SEQ ID NO: 539291 - RNA, 32 nt, Human
uugagaccagccugaccaacguuaaguaaccc

SEQ ID NO: 539292 - RNA, 32 nt, Human
uugagaccagccugaccaagguggugaaaccc

SEQ ID NO: 539293 - RNA, 32 nt, Human
uugagaccagccugaccaucauggugaaaccu

SEQ ID NO: 539294 - RNA, 32 nt, Human
uugagaccagccugacuaacacagugaaaccc

SEQ ID NO: 539295 - RNA, 23 nt, Human
uugagaccagccugagcaacaug

SEQ ID NO: 539296 - RNA, 32 nt, Human
uugagaccagccugagcaacauggcgaaaccu

SEQ ID NO: 539297 - RNA, 32 nt, Human
uugagaccagccugagcaauguggugaaaccc

SEQ ID NO: 539298 - RNA, 32 nt, Human
uugagaccagccugagugacauagugagacuu

SEQ ID NO: 539299 - RNA, 32 nt, Human
uugagaccagccugaucaacauggugaaaccc

SEQ ID NO: 539300 - RNA, 32 nt, Human
uugagaccagccugaucaacguggugaaaccu

SEQ ID NO: 539301 - RNA, 32 nt, Human
uugagaccagccugcccaacauggugaaaccc

SEQ ID NO: 539302 - RNA, 32 nt, Human
uugagaccagccuggacaacacagugagaccu

SEQ ID NO: 539303 - RNA, 32 nt, Human
uugagaccagccuggacaacaugggaaaaccc

SEQ ID NO: 539304 - RNA, 32 nt, Human
uugagaccagccuggacaacauggugaaaccc

SEQ ID NO: 539305 - RNA, 32 nt, Human
uugagaccagccuggcaaacauggcaaaacug

SEQ ID NO: 539306 - RNA, 32 nt, Human
uugagaccagccuggcaaacauggugaaaccc

SEQ ID NO: 539307 - RNA, 32 nt, Human
uugagaccagccuggccaaaauggugaaacuc

SEQ ID NO: 539308 - RNA, 32 nt, Human
uugagaccagccuggccaaauggugaaacccc

SEQ ID NO: 539309 - RNA, 32 nt, Human
uugagaccagccuggccaacacaguaaacccu

SEQ ID NO: 539310 - RNA, 32 nt, Human
uugagaccagccuggccaacacggugaaaccc

SEQ ID NO: 539311 - RNA, 32 nt, Human
uugagaccagccuggccaacagggugaaaccc

SEQ ID NO: 539312 - RNA, 32 nt, Human
uugagaccagccuggccaacauagugaaaccc

SEQ ID NO: 539313 - RNA, 32 nt, Human
uugagaccagccuggccaacauauagugaaac

SEQ ID NO: 539314 - RNA, 23 nt, Human
uugagaccagccuggccaacaug

SEQ ID NO: 539315 - RNA, 32 nt, Human
uugagaccagccuggccaacaugaugaaaccc

SEQ ID NO: 539316 - RNA, 32 nt, Human
uugagaccagccuggccaacaugaugaaaugu

SEQ ID NO: 539317 - RNA, 32 nt, Human
uugagaccagccuggccaacaugcugaaaccc

SEQ ID NO: 539318 - RNA, 32 nt, Human
uugagaccagccuggccaacauggagaaaccc

SEQ ID NO: 539319 - RNA, 32 nt, Human
uugagaccagccuggccaacauggcaaaaacc

SEQ ID NO: 539320 - RNA, 32 nt, Human
uugagaccagccuggccaacauggcaaaacca

SEQ ID NO: 539321 - RNA, 32 nt, Human
uugagaccagccuggccaacauggcaaaaccc

SEQ ID NO: 539322 - RNA, 32 nt, Human
uugagaccagccuggccaacauggcaaaaccu

SEQ ID NO: 539323 - RNA, 32 nt, Human
uugagaccagccuggccaacauggcgaaaccc

SEQ ID NO: 539324 - RNA, 32 nt, Human
uugagaccagccuggccaacauggcgaaaccu

SEQ ID NO: 539325 - RNA, 32 nt, Human
uugagaccagccuggccaacauggcgagaccc

SEQ ID NO: 539326 - RNA, 32 nt, Human
uugagaccagccuggccaacauggcggaaccc

SEQ ID NO: 539327 - RNA, 32 nt, Human
uugagaccagccuggccaacaugguaaaacac

SEQ ID NO: 539328 - RNA, 32 nt, Human
uugagaccagccuggccaacaugguaaaaccc

SEQ ID NO: 539329 - RNA, 32 nt, Human
uugagaccagccuggccaacaugguaaaacgc

SEQ ID NO: 539330 - RNA, 32 nt, Human
uugagaccagccuggccaacaugguaaaaucc

SEQ ID NO: 539331 - RNA, 32 nt, Human
uugagaccagccuggccaacauggugaaacac

SEQ ID NO: 539332 - RNA, 32 nt, Human
uugagaccagccuggccaacauggugaaaccc

SEQ ID NO: 539333 - RNA, 32 nt, Human
uugagaccagccuggccaacauggugaaaccg

SEQ ID NO: 539334 - RNA, 32 nt, Human
uugagaccagccuggccaacauggugaaaccu

SEQ ID NO: 539335 - RNA, 32 nt, Human
uugagaccagccuggccaacauggugaaaucc

SEQ ID NO: 539336 - RNA, 32 nt, Human
uugagaccagccuggccaacauggugaaaucu

SEQ ID NO: 539337 - RNA, 32 nt, Human
uugagaccagccuggccaacauggugaagcuc

SEQ ID NO: 539338 - RNA, 32 nt, Human
uugagaccagccuggccaacauggugagaccc

SEQ ID NO: 539339 - RNA, 32 nt, Human
uugagaccagccuggccaacauggugauaucu

SEQ ID NO: 539340 - RNA, 32 nt, Human
uugagaccagccuggccaacaugguggaaccc

SEQ ID NO: 539341 - RNA, 32 nt, Human
uugagaccagccuggccaaccaacauggugaa

SEQ ID NO: 539342 - RNA, 32 nt, Human
uugagaccagccuggccaacguagugaaaccc

SEQ ID NO: 539343 - RNA, 32 nt, Human
uugagaccagccuggccaacguggcaaaaccc

SEQ ID NO: 539344 - RNA, 32 nt, Human
uugagaccagccuggccaacguggcaaaaccu

SEQ ID NO: 539345 - RNA, 32 nt, Human
uugagaccagccuggccaacguggugaaaccc

SEQ ID NO: 539346 - RNA, 32 nt, Human
uugagaccagccuggccaagauggugaaaccc

SEQ ID NO: 539347 - RNA, 32 nt, Human
uugagaccagccuggccaauauggcaaaaccc

SEQ ID NO: 539348 - RNA, 32 nt, Human
uugagaccagccuggccaauauggcgaaaccc

SEQ ID NO: 539349 - RNA, 32 nt, Human
uugagaccagccuggccaauauggugaaacca

SEQ ID NO: 539350 - RNA, 32 nt, Human
uugagaccagccuggccaauauggugaaaccc

SEQ ID NO: 539351 - RNA, 32 nt, Human
uugagaccagccuggccaauguggugaaaccc

SEQ ID NO: 539352 - RNA, 32 nt, Human
uugagaccagccuggccaccauggugagaccc

SEQ ID NO: 539353 - RNA, 32 nt, Human
uugagaccagccuggccagcauggcgaaaccu

SEQ ID NO: 539354 - RNA, 32 nt, Human
uugagaccagccuggccagcauggugaaaccc

SEQ ID NO: 539355 - RNA, 32 nt, Human
uugagaccagccuggcccacauggugaaaccc

SEQ ID NO: 539356 - RNA, 32 nt, Human
uugagaccagccuggccgacauggugaaaccc

SEQ ID NO: 539357 - RNA, 32 nt, Human
uugagaccagccuggcuaacauggugaaaucc

SEQ ID NO: 539358 - RNA, 32 nt, Human
uugagaccagccuggcugacaggguaaaaccc

SEQ ID NO: 539359 - RNA, 21 nt, Human
uugagaccagccugggcaaca

SEQ ID NO: 539360 - RNA, 32 nt, Human
uugagaccagccugggcaacaaagugagaccc

SEQ ID NO: 539361 - RNA, 32 nt, Human
uugagaccagccugggcaacacggugaaaccc

SEQ ID NO: 539362 - RNA, 32 nt, Human
uugagaccagccugggcaacagagugagacuc

SEQ ID NO: 539363 - RNA, 32 nt, Human
uugagaccagccugggcaacaggguaaggucc

SEQ ID NO: 539364 - RNA, 32 nt, Human
uugagaccagccugggcaacauaguaagaccu

SEQ ID NO: 539365 - RNA, 32 nt, Human
uugagaccagccugggcaacauaguaagacgc

SEQ ID NO: 539366 - RNA, 32 nt, Human
uugagaccagccugggcaacauagugagacug

SEQ ID NO: 539367 - RNA, 32 nt, Human
uugagaccagccugggcaacauagugagaucc

SEQ ID NO: 539368 - RNA, 32 nt, Human
uugagaccagccugggcaacauagugaggccc

SEQ ID NO: 539369 - RNA, 32 nt, Human
uugagaccagccugggcaacauagugagugag

SEQ ID NO: 539370 - RNA, 32 nt, Human
uugagaccagccugggcaacauagugauaccc

SEQ ID NO: 539371 - RNA, 32 nt, Human
uugagaccagccugggcaacaucaugagacgu

SEQ ID NO: 539372 - RNA, 23 nt, Human
uugagaccagccugggcaacaug

SEQ ID NO: 539373 - RNA, 32 nt, Human
uugagaccagccugggcaacaugaugaaaacu

SEQ ID NO: 539374 - RNA, 32 nt, Human
uugagaccagccugggcaacauggagaaaccc

SEQ ID NO: 539375 - RNA, 32 nt, Human
uugagaccagccugggcaacauggagagaccc

SEQ ID NO: 539376 - RNA, 32 nt, Human
uugagaccagccugggcaacauggcaaaaacc

SEQ ID NO: 539377 - RNA, 32 nt, Human
uugagaccagccugggcaacauggcaaaaccc

SEQ ID NO: 539378 - RNA, 32 nt, Human
uugagaccagccugggcaacauggcaaaaucc

SEQ ID NO: 539379 - RNA, 32 nt, Human
uugagaccagccugggcaacauggcaagaccc

SEQ ID NO: 539380 - RNA, 32 nt, Human
uugagaccagccugggcaacauggcacaauug

SEQ ID NO: 539381 - RNA, 32 nt, Human
uugagaccagccugggcaacauggcgaggccu

SEQ ID NO: 539382 - RNA, 32 nt, Human
uugagaccagccugggcaacauggcuaaaccc

SEQ ID NO: 539383 - RNA, 32 nt, Human
uugagaccagccugggcaacauggugaaaccc

SEQ ID NO: 539384 - RNA, 32 nt, Human
uugagaccagccugggcaauauagugagaccu

SEQ ID NO: 539385 - RNA, 32 nt, Human
uugagaccagccugggcaauaucgugagaccc

SEQ ID NO: 539386 - RNA, 32 nt, Human
uugagaccagccugggcaauauggugagacuc

SEQ ID NO: 539387 - RNA, 32 nt, Human
uugagaccagccugggcaccauggugaaaccu

SEQ ID NO: 539388 - RNA, 32 nt, Human
uugagaccagccugggcgauauagugaggccc

SEQ ID NO: 539389 - RNA, 23 nt, Human
uugagaccagccuggggaacaua

SEQ ID NO: 539390 - RNA, 32 nt, Human
uugagaccagccuggggaacauagugagaccc

SEQ ID NO: 539391 - RNA, 32 nt, Human
uugagaccagccuggguaacauagugagaccc

SEQ ID NO: 539392 - RNA, 32 nt, Human
uugagaccagccuggguaacaugauaaaaccu

SEQ ID NO: 539393 - RNA, 32 nt, Human
uugagaccagccugguaaaauagugagaccuc

SEQ ID NO: 539394 - RNA, 32 nt, Human
uugagaccagccuggucaacauggcgaaaccc

SEQ ID NO: 539395 - RNA, 32 nt, Human
uugagaccagccuggucaacaugguaaaaccc

SEQ ID NO: 539396 - RNA, 32 nt, Human
uugagaccagccuugacaacauggugaaaccc

SEQ ID NO: 539397 - RNA, 32 nt, Human
uugagaccagccuugccaacacagugaaaccc

SEQ ID NO: 539398 - RNA, 32 nt, Human
uugagaccagcguggcuaacacggugaaaccc

SEQ ID NO: 539399 - RNA, 32 nt, Human
uugagaccagcuuagccaacauaguaagaccc

SEQ ID NO: 539400 - RNA, 32 nt, Human
uugagaccagcuuggccaacauggugaaaccc

SEQ ID NO: 539401 - RNA, 32 nt, Human
uugagaccagcuuggccaacauggugaaaucc

SEQ ID NO: 539402 - RNA, 23 nt, Human
uugagaccagcuugggcaacaug

SEQ ID NO: 539403 - RNA, 32 nt, Human
uugagaccagcuugggcaacauggugaaacuu

SEQ ID NO: 539404 - RNA, 32 nt, Human
uugagaccaggaaguugaggcugcaaugagcc

SEQ ID NO: 539405 - RNA, 32 nt, Human
uugagaccaggaauucaagaccagccugggca

SEQ ID NO: 539406 - RNA, 32 nt, Human
uugagaccaggagaucaaggcugcagcgagcu

SEQ ID NO: 539407 - RNA, 32 nt, Human
uugagaccaggagcucgaggcuguaaugugcc

SEQ ID NO: 539408 - RNA, 32 nt, Human
uugagaccaggaggucaagaccagccuggcca

SEQ ID NO: 539409 - RNA, 32 nt, Human
uugagaccaggaguucaagaccagccugagaa

SEQ ID NO: 539410 - RNA, 32 nt, Human
uugagaccaggaguucaagaccagccugggca

SEQ ID NO: 539411 - RNA, 32 nt, Human
uugagaccaggaguucgagaccagccugagaa

SEQ ID NO: 539412 - RNA, 32 nt, Human
uugagaccaggaguucgagaccagccuggcca

SEQ ID NO: 539413 - RNA, 32 nt, Human
uugagaccaggaguucgagaccagccugggca

SEQ ID NO: 539414 - RNA, 32 nt, Human
uugagaccaggaguuugagaccagccuaggca

SEQ ID NO: 539415 - RNA, 32 nt, Human
uugagaccaggaguuugaggcuucagugagcu

SEQ ID NO: 539416 - RNA, 32 nt, Human
uugagaccaggcugggcaacauggugaaaccc

SEQ ID NO: 539417 - RNA, 32 nt, Human
uugagaccagguguucaagaccagccucauca

SEQ ID NO: 539418 - RNA, 32 nt, Human
uugagaccagucuggccaacaaggcgaaaccc

SEQ ID NO: 539419 - RNA, 32 nt, Human
uugagaccagucuggccaacauggcgaaaccc

SEQ ID NO: 539420 - RNA, 32 nt, Human
uugagaccagucuggccaacauggugaaaccc

SEQ ID NO: 539421 - RNA, 32 nt, Human
uugagaccaguguggccaacauggugaaaccc

SEQ ID NO: 539422 - RNA, 32 nt, Human
uugagaccaucccggcuaacacggugaaaccc

SEQ ID NO: 539423 - RNA, 32 nt, Human
uugagaccauccugaguaacauggugaaaccc

SEQ ID NO: 539424 - RNA, 32 nt, Human
uugagaccauccuggauaacauggugaaacca

SEQ ID NO: 539425 - RNA, 32 nt, Human
uugagaccauccuggcaaacauggugaaaccc

SEQ ID NO: 539426 - RNA, 32 nt, Human
uugagaccauccuggccaacauggugaaaccc

SEQ ID NO: 539427 - RNA, 32 nt, Human
uugagaccauccuggccaacauggugaaaccu

SEQ ID NO: 539428 - RNA, 32 nt, Human
uugagaccauccuggccagcauggugaaaccc

SEQ ID NO: 539429 - RNA, 32 nt, Human
uugagaccauccuggcuaacacagugaaaccc

SEQ ID NO: 539430 - RNA, 32 nt, Human
uugagaccauccuggcuaacacagugaaaucc

SEQ ID NO: 539431 - RNA, 32 nt, Human
uugagaccauccuggcuaacacggugaaaccc

SEQ ID NO: 539432 - RNA, 32 nt, Human
uugagaccauccuggcuaacacggugaaacuc

SEQ ID NO: 539433 - RNA, 32 nt, Human
uugagaccauccuggcuaacacggugagaccc

SEQ ID NO: 539434 - RNA, 32 nt, Human
uugagaccauccuggcuaacauggugaaaccc

SEQ ID NO: 539435 - RNA, 32 nt, Human
uugagaccauccugggcaacauggcgaaaccc

SEQ ID NO: 539436 - RNA, 20 nt, Human
uugagacccaaguggcaggg

SEQ ID NO: 539437 - RNA, 32 nt, Human
uugagacccaggaggugugcggaugggucccu

SEQ ID NO: 539438 - RNA, 32 nt, Human
uugagacccaggccuggcugguccugccagga

SEQ ID NO: 539439 - RNA, 32 nt, Human
uugagaccggcaugaggauggaagaggcucag

SEQ ID NO: 539440 - RNA, 32 nt, Human
uugagaccggccuggccaacauggugaaaccc

SEQ ID NO: 539441 - RNA, 32 nt, Human
uugagaccggccuggccagcguggugaagccu

SEQ ID NO: 539442 - RNA, 32 nt, Human
uugagaccguccuggcuaacacggugaaaccu

SEQ ID NO: 539443 - RNA, 32 nt, Human
uugagaccugccuggccaacaugaugaaaccc

SEQ ID NO: 539444 - RNA, 32 nt, Human
uugagaccuuccuggcuaacauggugaaaccc

SEQ ID NO: 539445 - RNA, 32 nt, Human
uugagacgagggcagagaacaggaagauacau

SEQ ID NO: 539446 - RNA, 32 nt, Human
uugagacgcaggaggggcugggcaucgaguac

SEQ ID NO: 539447 - RNA, 32 nt, Human
uugagacggagauucacuuuuguugcccaggc

SEQ ID NO: 539448 - RNA, 32 nt, Human
uugagacggagauucgcucugucgccaggcug

SEQ ID NO: 539449 - RNA, 32 nt, Human
uugagacggaguccagccugggcaacagagua

SEQ ID NO: 539450 - RNA, 21 nt, Human
uugagacggagucucacucug

SEQ ID NO: 539451 - RNA, 32 nt, Human
uugagacggagucucgcucugccgcccaggcu

SEQ ID NO: 539452 - RNA, 32 nt, Human
uugagacggagucugcucugucgcucgcgcug

SEQ ID NO: 539453 - RNA, 32 nt, Human
uugagacggagucuugcucugccgcccaggcg

SEQ ID NO: 539454 - RNA, 32 nt, Human
uugagacggaguuucacgcuuauugcccaggc

SEQ ID NO: 539455 - RNA, 32 nt, Human
uugagacggaguuucacucuuauugcccaggc

SEQ ID NO: 539456 - RNA, 32 nt, Human
uugagacggaguuucacucuugucacccaggc

SEQ ID NO: 539457 - RNA, 32 nt, Human
uugagacggaguuucacucuuguugcccaggc

SEQ ID NO: 539458 - RNA, 32 nt, Human
uugagacggaguuucacuuuuguugcccaggc

SEQ ID NO: 539459 - RNA, 32 nt, Human
uugagacggaguuucccucuguugcccaggcu

SEQ ID NO: 539460 - RNA, 32 nt, Human
uugagacggaguuucccucuuguugcccgggc

SEQ ID NO: 539461 - RNA, 32 nt, Human
uugagacggaguuucgcucugucgcccaggcu

SEQ ID NO: 539462 - RNA, 32 nt, Human
uugagacggaguuucgcucuuauugcccaggc

SEQ ID NO: 539463 - RNA, 32 nt, Human
uugagacggaguuucgcucuuggugcccaggc

SEQ ID NO: 539464 - RNA, 23 nt, Human
uugagacggaguuucgcucuugu

SEQ ID NO: 539465 - RNA, 32 nt, Human
uugagacggaguuucgcucuugucaccccagc

SEQ ID NO: 539466 - RNA, 32 nt, Human
uugagacggaguuucgcucuugucgcccaggc

SEQ ID NO: 539467 - RNA, 32 nt, Human
uugagacggaguuucgcucuuguugcccaagc

SEQ ID NO: 539468 - RNA, 32 nt, Human
uugagacggaguuucgcuguuguugcccaggc

SEQ ID NO: 539469 - RNA, 32 nt, Human
uugagacggaguuucgcuuuugucccccaagc

SEQ ID NO: 539470 - RNA, 32 nt, Human
uugagacggaguuucucucuuguuacccaggc

SEQ ID NO: 539471 - RNA, 32 nt, Human
uugagacggaguuuugcucuuguagcccaggc

SEQ ID NO: 539472 - RNA, 32 nt, Human
uugagacggaguuuugcucuuguuacccaggc

SEQ ID NO: 539473 - RNA, 32 nt, Human
uugagacggaguuuugcucuuguugcccaggc

SEQ ID NO: 539474 - RNA, 32 nt, Human
uugagacggaguuuuguucuuguugcccaggc

SEQ ID NO: 539475 - RNA, 32 nt, Human
uugagacgggguuucgcucuuguuguccaggc

SEQ ID NO: 539476 - RNA, 32 nt, Human
uugagacgguccuggcuaacacggugaaaccc

SEQ ID NO: 539477 - RNA, 32 nt, Human
uugagacggucucauucugucacccagacugg

SEQ ID NO: 539478 - RNA, 22 nt, Human
uugagacuacaggcaugagcca

SEQ ID NO: 539479 - RNA, 32 nt, Human
uugagacuagccucacuaacauggugaaaccc

SEQ ID NO: 539480 - RNA, 32 nt, Human
uugagacuagccuggcaaacaugaugaaaccc

SEQ ID NO: 539481 - RNA, 32 nt, Human
uugagacuagccuggccaacauggugagaccc

SEQ ID NO: 539482 - RNA, 32 nt, Human
uugagacuagccuggccaagauggugaaaccc

SEQ ID NO: 539483 - RNA, 32 nt, Human
uugagacuagccuggccaauauagugggaccc

SEQ ID NO: 539484 - RNA, 32 nt, Human
uugagacuagccuggccaauauggugaaaccc

SEQ ID NO: 539485 - RNA, 32 nt, Human
uugagacuagccuggccagcauggugaaaccu

SEQ ID NO: 539486 - RNA, 32 nt, Human
uugagacuagccugggcaacauggugaaaccc

SEQ ID NO: 539487 - RNA, 32 nt, Human
uugagacuagccugggcaacauggugagaccc

SEQ ID NO: 539488 - RNA, 32 nt, Human
uugagacuagcuuggccaacauagugaaaccc

SEQ ID NO: 539489 - RNA, 32 nt, Human
uugagacuaggaguuugaggcugcagugaacu

SEQ ID NO: 539490 - RNA, 32 nt, Human
uugagacuagucuggccaacauggugaaacac

SEQ ID NO: 539491 - RNA, 32 nt, Human
uugagacuccacuguucucaaacaccucuaac

SEQ ID NO: 539492 - RNA, 32 nt, Human
uugagacugaaauuuaaaaauauugagaauaa

SEQ ID NO: 539493 - RNA, 32 nt, Human
uugagacugagaguuggaggcugcgaugagcc

SEQ ID NO: 539494 - RNA, 32 nt, Human
uugagacugaguagaugaauuauugaauguga

SEQ ID NO: 539495 - RNA, 32 nt, Human
uugagacugaguuucacucuuguugcccaggc

SEQ ID NO: 539496 - RNA, 32 nt, Human
uugagacugaguuucgcucuugucauccuggc

SEQ ID NO: 539497 - RNA, 32 nt, Human
uugagacugcuugcccgugggcucagaaguga

SEQ ID NO: 539498 - RNA, 32 nt, Human
uugagagaaaagcuccuuuucucuucacuguu

SEQ ID NO: 539499 - RNA, 32 nt, Human
uugagagaaagggagagagggagggagagaga

SEQ ID NO: 539500 - RNA, 32 nt, Human
uugagagaacgaggaggaaggagagaaaaugg

SEQ ID NO: 539501 - RNA, 32 nt, Human
uugagagaacuccaugcugguggagaaaaaca

SEQ ID NO: 539502 - RNA, 32 nt, Human
uugagagacugaggcaggagaaucgcuugaac

SEQ ID NO: 539503 - RNA, 32 nt, Human
uugagagagacacuacaugacuccaaguauau

SEQ ID NO: 539504 - RNA, 32 nt, Human
uugagagagcccagaggggcagagcccagagc

SEQ ID NO: 539505 - RNA, 32 nt, Human
uugagagagcuaugcuauagaggggaaaauga

SEQ ID NO: 539506 - RNA, 32 nt, Human
uugagagagcuggaaggcaugguggcuaaggg

SEQ ID NO: 539507 - RNA, 24 nt, Human
uugagagaggaacaacagaacagu

SEQ ID NO: 539508 - RNA, 32 nt, Human
uugagagcagccagggcaacacagcgagaccc

SEQ ID NO: 539509 - RNA, 32 nt, Human
uugagagcagccuggccaacagaggugagcac

SEQ ID NO: 539510 - RNA, 32 nt, Human
uugagagcagccuggcuaacauggugaaaccc

SEQ ID NO: 539511 - RNA, 32 nt, Human
uugagagcauaggccuugguggcaggugcauc

SEQ ID NO: 539512 - RNA, 32 nt, Human
uugagagccagccacagccucuggggagccag

SEQ ID NO: 539513 - RNA, 32 nt, Human
uugagagcccuagaaagcugcugugaucccag

SEQ ID NO: 539514 - RNA, 32 nt, Human
uugagagcuucacacagacaaugagagagggu

SEQ ID NO: 539515 - RNA, 17 nt, Human
uugagaggaacagaaag

SEQ ID NO: 539516 - RNA, 32 nt, Human
uugagaggcacccccuuccuccgucaucacag

SEQ ID NO: 539517 - RNA, 32 nt, Human
uugagaggcagaggcaggagaaucgcuugaac

SEQ ID NO: 539518 - RNA, 32 nt, Human
uugagaggcagaggcaggaggaucaggagccc

SEQ ID NO: 539519 - RNA, 32 nt, Human
uugagaggccaaggcagguggaucacgagguc

SEQ ID NO: 539520 - RNA, 32 nt, Human
uugagaggccgaggcaggcggaucaugagguc

SEQ ID NO: 539521 - RNA, 32 nt, Human
uugagaggccgaggcggguagaucacuuuagg

SEQ ID NO: 539522 - RNA, 32 nt, Human
uugagaggccgaggcgggugggucaccugagg

SEQ ID NO: 539523 - RNA, 32 nt, Human
uugagaggccgaggcggguguaucaccugagg

SEQ ID NO: 539524 - RNA, 32 nt, Human
uugagaggccgagguggguggaucacgaguuc

SEQ ID NO: 539525 - RNA, 32 nt, Human
uugagaggcgaggagguagugggugaggcuac

SEQ ID NO: 539526 - RNA, 32 nt, Human
uugagaggcuaacucucccaaaaaggaccaug

SEQ ID NO: 539527 - RNA, 32 nt, Human
uugagaggcugaagaggguggaucaugaggug

SEQ ID NO: 539528 - RNA, 32 nt, Human
uugagaggcugaagcagaagaaucucuugagc

SEQ ID NO: 539529 - RNA, 32 nt, Human
uugagaggcugaagcagaauuauuugaggcca

SEQ ID NO: 539530 - RNA, 32 nt, Human
uugagaggcugaaguagauguuucagcugaaa

SEQ ID NO: 539531 - RNA, 32 nt, Human
uugagaggcugagacacgagaaucacuugaac

SEQ ID NO: 539532 - RNA, 32 nt, Human
uugagaggcugagauaggagaaucacuggaac

SEQ ID NO: 539533 - RNA, 32 nt, Human
uugagaggcugagcgggguggaucauuugagg

SEQ ID NO: 539534 - RNA, 32 nt, Human
uugagaggcugaggaggguggaucauuugagg

SEQ ID NO: 539535 - RNA, 32 nt, Human
uugagaggcugaggcaggagaaucgcuugaac

SEQ ID NO: 539536 - RNA, 32 nt, Human
uugagaggcugaggcggguggaucaccugagg

SEQ ID NO: 539537 - RNA, 32 nt, Human
uugagaggcugaggcggguggaucacuugagg

SEQ ID NO: 539538 - RNA, 32 nt, Human
uugagaggcugaggugggaggaucauuugagu

SEQ ID NO: 539539 - RNA, 32 nt, Human
uugagaggcugagguggguggaucacuugagg

SEQ ID NO: 539540 - RNA, 32 nt, Human
uugagaggcuggggcaggagaaucacuagaac

SEQ ID NO: 539541 - RNA, 32 nt, Human
uugagagggaguuucacucuuguugcccaggc

SEQ ID NO: 539542 - RNA, 32 nt, Human
uugagaggggagguggaguuggaaaugugggu

SEQ ID NO: 539543 - RNA, 32 nt, Human
uugagaggggcuggauguaaucaccuuugguu

SEQ ID NO: 539544 - RNA, 32 nt, Human
uugagaggggcuuugcugaggcuuccccuugg

SEQ ID NO: 539545 - RNA, 32 nt, Human
uugagaggucaaagugggagaaucacuugagc

SEQ ID NO: 539546 - RNA, 32 nt, Human
uugagaguagagcuagggccccagggauugcu

SEQ ID NO: 539547 - RNA, 32 nt, Human
uugagagucccugaagccaggauauuagaaga

SEQ ID NO: 539548 - RNA, 32 nt, Human
uugagaguccucccuccccaaccuccuccauu

SEQ ID NO: 539549 - RNA, 32 nt, Human
uugagagucugaagcaggagaauugcuugaac

SEQ ID NO: 539550 - RNA, 32 nt, Human
uugagagugacugccuggcccugcugcaacac

SEQ ID NO: 539551 - RNA, 32 nt, Human
uugagaguggcaucuauuagauucagaccacc

SEQ ID NO: 539552 - RNA, 32 nt, Human
uugagaguugggggcugggaagggcggggccc

SEQ ID NO: 539553 - RNA, 32 nt, Human
uugagauaccacaaacccugcugaacacagug

SEQ ID NO: 539554 - RNA, 32 nt, Human
uugagauaccacaaacccugcugaacagagug

SEQ ID NO: 539555 - RNA, 32 nt, Human
uugagauaguuuuuccagagcuggaggucacg

SEQ ID NO: 539556 - RNA, 32 nt, Human
uugagauauaucuccaaaaaccaucuucauuu

SEQ ID NO: 539557 - RNA, 32 nt, Human
uugagaucaagaguucaagaccagccuggcca

SEQ ID NO: 539558 - RNA, 22 nt, Human
uugagaucacaggcgugagcca

SEQ ID NO: 539559 - RNA, 32 nt, Human
uugagaucagcccgggcaacauggugaaaccc

SEQ ID NO: 539560 - RNA, 32 nt, Human
uugagaucagcccugggcaacauagugagacc

SEQ ID NO: 539561 - RNA, 32 nt, Human
uugagaucagccugcccaacauggugaaaccu

SEQ ID NO: 539562 - RNA, 32 nt, Human
uugagaucagccuggagaacaaagugagaccc

SEQ ID NO: 539563 - RNA, 32 nt, Human
uugagaucagccuggcaaacauggcgacaccc

SEQ ID NO: 539564 - RNA, 32 nt, Human
uugagaucagccuggccaacagacgugagcca

SEQ ID NO: 539565 - RNA, 32 nt, Human
uugagaucagccuggccaacauagugaaaccc

SEQ ID NO: 539566 - RNA, 32 nt, Human
uugagaucagccuggccaacauggugaaaccc

SEQ ID NO: 539567 - RNA, 32 nt, Human
uugagaucagccuggccaauauggugaaaccc

SEQ ID NO: 539568 - RNA, 32 nt, Human
uugagaucagccuggccaaugugguaaaaccu

SEQ ID NO: 539569 - RNA, 32 nt, Human
uugagaucagccuggccaauguggugaaaccc

SEQ ID NO: 539570 - RNA, 32 nt, Human
uugagaucagccuggccagcauggcgaaaccc

SEQ ID NO: 539571 - RNA, 32 nt, Human
uugagaucagccugggcaacauggugaaaccu

SEQ ID NO: 539572 - RNA, 32 nt, Human
uugagaucagccugggcaacaugguggaaccc

SEQ ID NO: 539573 - RNA, 32 nt, Human
uugagaucagccugggcaaugugauaaaaccc

SEQ ID NO: 539574 - RNA, 32 nt, Human
uugagaucaggaguucaagaccagccuggcca

SEQ ID NO: 539575 - RNA, 32 nt, Human
uugagaucaggaguucgagaccagccuggcca

SEQ ID NO: 539576 - RNA, 32 nt, Human
uugagaucaggaguucgagaccagccuggugc

SEQ ID NO: 539577 - RNA, 32 nt, Human
uugagaucaggaguuugaaaccagccuggcca

SEQ ID NO: 539578 - RNA, 32 nt, Human
uugagaucaggaguuugagaccagccuggcca

SEQ ID NO: 539579 - RNA, 32 nt, Human
uugagaucaggggaagauggcagauaggaggc

SEQ ID NO: 539580 - RNA, 32 nt, Human
uugagaucaucccggccaacauagugaaaccc

SEQ ID NO: 539581 - RNA, 32 nt, Human
uugagaucauccuggccaacacggugaaaccc

SEQ ID NO: 539582 - RNA, 32 nt, Human
uugagaucgcacuccagccugggugacagagu

SEQ ID NO: 539583 - RNA, 32 nt, Human
uugagaucgccacugcacuccagccugggaaa

SEQ ID NO: 539584 - RNA, 32 nt, Human
uugagaucuaguuugccagcuccugggaaaca

SEQ ID NO: 539585 - RNA, 19 nt, Human
uugagaucucacagccaca

SEQ ID NO: 539586 - RNA, 32 nt, Human
uugagaucugcugacagauguuccauccugua

SEQ ID NO: 539587 - RNA, 32 nt, Human
uugagaucuuuguucccugaggugccaggcag

SEQ ID NO: 539588 - RNA, 32 nt, Human
uugagaugaagucucccucuuguuacccaggc

SEQ ID NO: 539589 - RNA, 32 nt, Human
uugagaugaaguuuuacucuuguugcccaggc

SEQ ID NO: 539590 - RNA, 32 nt, Human
uugagaugaaguuuugcucuuguuccccaggc

SEQ ID NO: 539591 - RNA, 32 nt, Human
uugagaugaugugguuuucaucuuucauuaug

SEQ ID NO: 539592 - RNA, 32 nt, Human
uugagaugaugugguuuucaucuuucauucug

SEQ ID NO: 539593 - RNA, 30 nt, Human
uugagaugauugagaagaugcagggaagca

SEQ ID NO: 539594 - RNA, 32 nt, Human
uugagaugcagagucuagagugcaguggugca

SEQ ID NO: 539595 - RNA, 32 nt, Human
uugagaugcaggagaaaggaagaggcauaaga

SEQ ID NO: 539596 - RNA, 31 nt, Human
uugagaugccucucuguggauccugucaccu

SEQ ID NO: 539597 - RNA, 32 nt, Human
uugagaugcucccaggguggacccacacauug

SEQ ID NO: 539598 - RNA, 32 nt, Human
uugagaugcugaggcagguggaucauuugagg

SEQ ID NO: 539599 - RNA, 32 nt, Human
uugagauggaauuuugcucuugucacccaggc

SEQ ID NO: 539600 - RNA, 32 nt, Human
uugagauggagucucgcucucuugcccaggcu

SEQ ID NO: 539601 - RNA, 32 nt, Human
uugagauggagucucgcucuugucgcccaggc

SEQ ID NO: 539602 - RNA, 32 nt, Human
uugagauggagucuugcucuugucgcccaggc

SEQ ID NO: 539603 - RNA, 32 nt, Human
uugagauggaguuucacccuuguugcccaggc

SEQ ID NO: 539604 - RNA, 32 nt, Human
uugagauggaguuucaccuuauucccaggcug

SEQ ID NO: 539605 - RNA, 32 nt, Human
uugagauggaguuucacucugucucccaggcu

SEQ ID NO: 539606 - RNA, 32 nt, Human
uugagauggaguuucacucuugcugcccaggc

SEQ ID NO: 539607 - RNA, 32 nt, Human
uugagauggaguuucacucuugucaaccagau

SEQ ID NO: 539608 - RNA, 32 nt, Human
uugagauggaguuucacucuugucacccaggc

SEQ ID NO: 539609 - RNA, 32 nt, Human
uugagauggaguuucacucuugucaccgaggc

SEQ ID NO: 539610 - RNA, 32 nt, Human
uugagauggaguuucacucuugucaccuagac

SEQ ID NO: 539611 - RNA, 32 nt, Human
uugagauggaguuucacucuugucucccagac

SEQ ID NO: 539612 - RNA, 32 nt, Human
uugagauggaguuucacucuugugcccaggcu

SEQ ID NO: 539613 - RNA, 32 nt, Human
uugagauggaguuucacucuuguugcccacgc

SEQ ID NO: 539614 - RNA, 32 nt, Human
uugagauggaguuucacucuuguugcccaggc

SEQ ID NO: 539615 - RNA, 32 nt, Human
uugagauggaguuucacucuuuuuacccaggc

SEQ ID NO: 539616 - RNA, 32 nt, Human
uugagauggaguuucacuguuguuccccaggc

SEQ ID NO: 539617 - RNA, 32 nt, Human
uugagauggaguuucagucuuguugcccaggc

SEQ ID NO: 539618 - RNA, 32 nt, Human
uugagauggaguuucauucuuguugccgaggc

SEQ ID NO: 539619 - RNA, 32 nt, Human
uugagauggaguuucauucuuguugccuaggc

SEQ ID NO: 539620 - RNA, 32 nt, Human
uugagauggaguuucgcgcuuguugcccaggc

SEQ ID NO: 539621 - RNA, 32 nt, Human
uugagauggaguuucgcucuguugccaggcug

SEQ ID NO: 539622 - RNA, 32 nt, Human
uugagauggaguuucgcucuguugcccaggcu

SEQ ID NO: 539623 - RNA, 32 nt, Human
uugagauggaguuucgcucuguuguccaggcu

SEQ ID NO: 539624 - RNA, 32 nt, Human
uugagauggaguuucgcucuugucacccacgc

SEQ ID NO: 539625 - RNA, 32 nt, Human
uugagauggaguuucgcucuuguugcccaggc

SEQ ID NO: 539626 - RNA, 32 nt, Human
uugagauggaguuucgcuguugucacccaggc

SEQ ID NO: 539627 - RNA, 32 nt, Human
uugagauggaguuucgcuuuuguugcccaggc

SEQ ID NO: 539628 - RNA, 32 nt, Human
uugagauggaguuucgugcuuguugcccaggc

SEQ ID NO: 539629 - RNA, 32 nt, Human
uugagauggaguuucguucuuguugcccaacc

SEQ ID NO: 539630 - RNA, 32 nt, Human
uugagauggaguuucucucuuguugcccaggc

SEQ ID NO: 539631 - RNA, 32 nt, Human
uugagauggaguuucucuugucaaccgggcug

SEQ ID NO: 539632 - RNA, 32 nt, Human
uugagauggaguuuggcuguugucucccaggc

SEQ ID NO: 539633 - RNA, 32 nt, Human
uugagauggaguuugguucuguccccgaggcc

SEQ ID NO: 539634 - RNA, 32 nt, Human
uugagauggaguuuucacucuuaucgcccagg

SEQ ID NO: 539635 - RNA, 30 nt, Human
uugagauggaguuuucgcucuuguugccca

SEQ ID NO: 539636 - RNA, 32 nt, Human
uugagauggaguuuugcucucguugccaaggc

SEQ ID NO: 539637 - RNA, 32 nt, Human
uugagauggaguuuugcucugucacccaggcu

SEQ ID NO: 539638 - RNA, 32 nt, Human
uugagauggaguuuugcucuuauugcccaggc

SEQ ID NO: 539639 - RNA, 32 nt, Human
uugagauggaguuuugcucuugcacuccaucc

SEQ ID NO: 539640 - RNA, 32 nt, Human
uugagauggaguuuugcucuuguagcccaggc

SEQ ID NO: 539641 - RNA, 32 nt, Human
uugagauggaguuuugcucuugucggccaggc

SEQ ID NO: 539642 - RNA, 32 nt, Human
uugagauggaguuuugcucuuguugcccagac

SEQ ID NO: 539643 - RNA, 32 nt, Human
uugagauggaguuuugcucuuguugcccaggc

SEQ ID NO: 539644 - RNA, 32 nt, Human
uugagauggaguuuugcucuuguugcugaggc

SEQ ID NO: 539645 - RNA, 32 nt, Human
uugagauggggcccaaaggacucccccugaag

SEQ ID NO: 539646 - RNA, 32 nt, Human
uugagauggggcuucucuuauugcccaggcug

SEQ ID NO: 539647 - RNA, 32 nt, Human
uugagauggggucuuggagugcaagugguaug

SEQ ID NO: 539648 - RNA, 32 nt, Human
uugagaugucuggaaguccaggaugacaccga

SEQ ID NO: 539649 - RNA, 32 nt, Human
uugagaugugccaggcucuguucuaagcacuu

SEQ ID NO: 539650 - RNA, 22 nt, Human
uugagauuacaggcaugagcca

SEQ ID NO: 539651 - RNA, 22 nt, Human
uugagauuacaggcgugagcca

SEQ ID NO: 539652 - RNA, 32 nt, Human
uugagauuagccuggccaagauggugaaaccc

SEQ ID NO: 539653 - RNA, 32 nt, Human
uugagauuaugagacugacgugcugcccacug

SEQ ID NO: 539654 - RNA, 32 nt, Human
uugagauucaaaggaaucucacuguuccuaaa

SEQ ID NO: 539655 - RNA, 32 nt, Human
uugagauuccaucagccaggaagaagggguaa

SEQ ID NO: 539656 - RNA, 32 nt, Human
uugagauucuuuauacucucugccuucagcaa

SEQ ID NO: 539657 - RNA, 22 nt, Human
uugagauugcaggcaugagcca

SEQ ID NO: 539658 - RNA, 32 nt, Human
uugagauugcucuuaagcugauuucccaaaca

SEQ ID NO: 539659 - RNA, 32 nt, Human
uugagauuucacugcauuuccccacucugccc

SEQ ID NO: 539660 - RNA, 32 nt, Human
uugagauuuccagaggacccagaccuuuguuc

SEQ ID NO: 539661 - RNA, 32 nt, Human
uugagauuucccucguggugccaggguccggc

SEQ ID NO: 539662 - RNA, 32 nt, Human
uugagauuuccuccucccucuggcugggauau

SEQ ID NO: 539663 - RNA, 32 nt, Human
uugagauuuuacccucuccuccaaccauuuug

SEQ ID NO: 539664 - RNA, 32 nt, Human
uugagcaaagcaguucuuucagaucugcaagu

SEQ ID NO: 539665 - RNA, 32 nt, Human
uugagcaacuguacuccagcuuggcgacagag

SEQ ID NO: 539666 - RNA, 32 nt, Human
uugagcaacuugauaucaaagcaggaaacuca

SEQ ID NO: 539667 - RNA, 32 nt, Human
uugagcaagaagacaggagcuggggacauucu

SEQ ID NO: 539668 - RNA, 32 nt, Human
uugagcaauagaagggaagugggauccgagcc

SEQ ID NO: 539669 - RNA, 32 nt, Human
uugagcacagaacccucagcucuggugcgggc

SEQ ID NO: 539670 - RNA, 32 nt, Human
uugagcacaggaguucaagaccagcgugggca

SEQ ID NO: 539671 - RNA, 32 nt, Human
uugagcacaggaguucgagaccagccuggaca

SEQ ID NO: 539672 - RNA, 32 nt, Human
uugagcacaggaguuugagaccagccugugca

SEQ ID NO: 539673 - RNA, 32 nt, Human
uugagcacaggaguuugaggcugcagugaccu

SEQ ID NO: 539674 - RNA, 32 nt, Human
uugagcacaggcguucgagaccagccugggca

SEQ ID NO: 539675 - RNA, 32 nt, Human
uugagcaccccaaaucugaaaggcuucugaac

SEQ ID NO: 539676 - RNA, 32 nt, Human
uugagcaccucaucuuuugcucaaauugaaau

SEQ ID NO: 539677 - RNA, 32 nt, Human
uugagcaccuccucuaggcgcuggggagucca

SEQ ID NO: 539678 - RNA, 32 nt, Human
uugagcacgagacacuuuucaucuggagcagg

SEQ ID NO: 539679 - RNA, 32 nt, Human
uugagcacugccugggaccugugcugagagag

SEQ ID NO: 539680 - RNA, 22 nt, Human
uugagcacuuaggugacaggaa

SEQ ID NO: 539681 - RNA, 32 nt, Human
uugagcagaauuccuggaccuggguggggcuu

SEQ ID NO: 539682 - RNA, 32 nt, Human
uugagcagagaacugcagccaggaugcgcuca

SEQ ID NO: 539683 - RNA, 32 nt, Human
uugagcagauacaaugaucugcuuuagugaga

SEQ ID NO: 539684 - RNA, 32 nt, Human
uugagcagauccagggaucagugagaggagug

SEQ ID NO: 539685 - RNA, 32 nt, Human
uugagcagaugauugaagcccagauuugaaug

SEQ ID NO: 539686 - RNA, 32 nt, Human
uugagcaggacgugagcgcagagcagagccug

SEQ ID NO: 539687 - RNA, 32 nt, Human
uugagcagggggagcaucuuauauucacccuu

SEQ ID NO: 539688 - RNA, 32 nt, Human
uugagcagguucccugaagcaagagaacucug

SEQ ID NO: 539689 - RNA, 31 nt, Human
uugagcagugagagagggaagggacuaacgu

SEQ ID NO: 539690 - RNA, 32 nt, Human
uugagcagugguuuguaauucuccuugaagag

SEQ ID NO: 539691 - RNA, 32 nt, Human
uugagcauaggaguuugagaccagccugggua

SEQ ID NO: 539692 - RNA, 32 nt, Human
uugagcauaugagagucacauccaggugaugu

SEQ ID NO: 539693 - RNA, 32 nt, Human
uugagcauccacugcucaaaguccaggcuauu

SEQ ID NO: 539694 - RNA, 32 nt, Human
uugagcauccuuucauaugcuuucuggccauu

SEQ ID NO: 539695 - RNA, 32 nt, Human
uugagcaucuccucuucuugaaggccaaccug

SEQ ID NO: 539696 - RNA, 32 nt, Human
uugagcauuaucaaaauccugugguauuuaua

SEQ ID NO: 539697 - RNA, 32 nt, Human
uugagccaaggaguucaagaccaacuugggca

SEQ ID NO: 539698 - RNA, 32 nt, Human
uugagccaaggaguucaagaccagccugggca

SEQ ID NO: 539699 - RNA, 32 nt, Human
uugagccaaugaguuggaggcugcagugagcu

SEQ ID NO: 539700 - RNA, 32 nt, Human
uugagccacaguuuuuagaucagcaccuggaa

SEQ ID NO: 539701 - RNA, 32 nt, Human
uugagccacgacagugcaugcacuccagccug

SEQ ID NO: 539702 - RNA, 32 nt, Human
uugagccacugcacuccaaucugggugacaga

SEQ ID NO: 539703 - RNA, 32 nt, Human
uugagccacugcacuccagccucggccacagu

SEQ ID NO: 539704 - RNA, 32 nt, Human
uugagccacugcacuccagccugggugacagc

SEQ ID NO: 539705 - RNA, 32 nt, Human
uugagccacugcacuccagccugggugacuga

SEQ ID NO: 539706 - RNA, 32 nt, Human
uugagccagccccagcgccuggugcugcaguc

SEQ ID NO: 539707 - RNA, 32 nt, Human
uugagccaggagacagaagcugugagccucug

SEQ ID NO: 539708 - RNA, 32 nt, Human
uugagccaggaggaggagguugcagugagccg

SEQ ID NO: 539709 - RNA, 32 nt, Human
uugagccaggagguugagguugcagugagcug

SEQ ID NO: 539710 - RNA, 32 nt, Human
uugagccagggaggucaaggcugcagugagcc

SEQ ID NO: 539711 - RNA, 32 nt, Human
uugagccauugcucuccagccugggugacaca

SEQ ID NO: 539712 - RNA, 32 nt, Human
uugagcccaagagguagagguugcagugagcc

SEQ ID NO: 539713 - RNA, 32 nt, Human
uugagcccaagagguugaggcugcagugagcc

SEQ ID NO: 539714 - RNA, 32 nt, Human
uugagcccaagagucggagaccagccugggca

SEQ ID NO: 539715 - RNA, 32 nt, Human
uugagcccaagaguucaagaccagccugggaa

SEQ ID NO: 539716 - RNA, 32 nt, Human
uugagcccaagaguuccagaccagccuggcca

SEQ ID NO: 539717 - RNA, 32 nt, Human
uugagcccaagaguucgacgcugcagugagcu

SEQ ID NO: 539718 - RNA, 32 nt, Human
uugagcccaagaguucgagaccagccugggca

SEQ ID NO: 539719 - RNA, 32 nt, Human
uugagcccaagaguuggagaccagccugggca

SEQ ID NO: 539720 - RNA, 32 nt, Human
uugagcccaagaguuugagaccagccuaggug

SEQ ID NO: 539721 - RNA, 32 nt, Human
uugagcccaagaguuuuagaccagccugggca

SEQ ID NO: 539722 - RNA, 32 nt, Human
uugagcccacgagauggaaguugcagugaacu

SEQ ID NO: 539723 - RNA, 32 nt, Human
uugagcccacgaguucaaggcugcagugaguc

SEQ ID NO: 539724 - RNA, 32 nt, Human
uugagcccagaacagccuacaggggaaaaaca

SEQ ID NO: 539725 - RNA, 32 nt, Human
uugagcccagaagcucaaggcugcagugagcc

SEQ ID NO: 539726 - RNA, 32 nt, Human
uugagcccagaagcuugaagcugcagugagcu

SEQ ID NO: 539727 - RNA, 32 nt, Human
uugagcccagaaggucgaggcugcagggagcu

SEQ ID NO: 539728 - RNA, 32 nt, Human
uugagcccagaagguugaagcugcagugaguu

SEQ ID NO: 539729 - RNA, 32 nt, Human
uugagcccagaaguucaaggcugcaaugagcc

SEQ ID NO: 539730 - RNA, 32 nt, Human
uugagcccagaaguucgagguugcagugagcc

SEQ ID NO: 539731 - RNA, 32 nt, Human
uugagcccagaaguugaagaccagccugagaa

SEQ ID NO: 539732 - RNA, 32 nt, Human
uugagcccagaaguuugagaccagccuaggca

SEQ ID NO: 539733 - RNA, 32 nt, Human
uugagcccagaaguuugagaccagccugugca

SEQ ID NO: 539734 - RNA, 32 nt, Human
uugagcccagaaguuugaggcugcaaugagcc

SEQ ID NO: 539735 - RNA, 32 nt, Human
uugagcccagaggcggagguugcagugagccg

SEQ ID NO: 539736 - RNA, 32 nt, Human
uugagcccagagguagaggcugcagugagcca

SEQ ID NO: 539737 - RNA, 32 nt, Human
uugagcccagagguuugcaaccagccugagca

SEQ ID NO: 539738 - RNA, 32 nt, Human
uugagcccagcaguucaagaccagccugggca

SEQ ID NO: 539739 - RNA, 32 nt, Human
uugagcccagcaguucgagaccagccuggaca

SEQ ID NO: 539740 - RNA, 32 nt, Human
uugagcccagcaguuggaggcugcagugagcu

SEQ ID NO: 539741 - RNA, 32 nt, Human
uugagcccagcuugagcaacauagugaaaucc

SEQ ID NO: 539742 - RNA, 32 nt, Human
uugagcccaggaaacauagugagaccccuuac

SEQ ID NO: 539743 - RNA, 32 nt, Human
uugagcccaggaagucaaggcugcagugagcu

SEQ ID NO: 539744 - RNA, 32 nt, Human
uugagcccaggaaguggaggcugcagugaccu

SEQ ID NO: 539745 - RNA, 32 nt, Human
uugagcccaggaaguggagguugcagugagca

SEQ ID NO: 539746 - RNA, 32 nt, Human
uugagcccaggaaguugaggcugcagugagcu

SEQ ID NO: 539747 - RNA, 32 nt, Human
uugagcccaggaaucugagaccagccugagca

SEQ ID NO: 539748 - RNA, 32 nt, Human
uugagcccaggaauucaagaccagccugggca

SEQ ID NO: 539749 - RNA, 32 nt, Human
uugagcccaggaauucaagaccaguccgagca

SEQ ID NO: 539750 - RNA, 32 nt, Human
uugagcccaggaauucgagaccagccuaggug

SEQ ID NO: 539751 - RNA, 32 nt, Human
uugagcccaggaauucgagaccagccugggca

SEQ ID NO: 539752 - RNA, 32 nt, Human
uugagcccaggaauucgagaccagccugggcc

SEQ ID NO: 539753 - RNA, 32 nt, Human
uugagcccaggaauuggaggcugcagugagcu

SEQ ID NO: 539754 - RNA, 32 nt, Human
uugagcccaggaauuugagaccagccuggaca

SEQ ID NO: 539755 - RNA, 32 nt, Human
uugagcccaggaauuugagaccagccugggca

SEQ ID NO: 539756 - RNA, 32 nt, Human
uugagcccaggaauuugaggcugcagcgagca

SEQ ID NO: 539757 - RNA, 32 nt, Human
uugagcccaggaauuugaggcugcagugagcu

SEQ ID NO: 539758 - RNA, 32 nt, Human
uugagcccaggacaucgaggcugcggugaacc

SEQ ID NO: 539759 - RNA, 32 nt, Human
uugagcccaggacucuaaggcugcagugagcu

SEQ ID NO: 539760 - RNA, 32 nt, Human
uugagcccaggacuucaagaccagccuaggca

SEQ ID NO: 539761 - RNA, 32 nt, Human
uugagcccaggagaugcaggcuugcagugagc

SEQ ID NO: 539762 - RNA, 32 nt, Human
uugagcccaggagauuaagacuguaguauacu

SEQ ID NO: 539763 - RNA, 32 nt, Human
uugagcccaggagauugaggcugcagugagca

SEQ ID NO: 539764 - RNA, 32 nt, Human
uugagcccaggagauugaggcugcagugagcc

SEQ ID NO: 539765 - RNA, 32 nt, Human
uugagcccaggagcucaagaccagccuggaca

SEQ ID NO: 539766 - RNA, 32 nt, Human
uugagcccaggagcucgagaccagcuugguca

SEQ ID NO: 539767 - RNA, 32 nt, Human
uugagcccaggagcuggaggcugcagugaacu

SEQ ID NO: 539768 - RNA, 32 nt, Human
uugagcccaggaggaggaggcugcagugagcu

SEQ ID NO: 539769 - RNA, 32 nt, Human
uugagcccaggaggcagaauuugcagugagcu

SEQ ID NO: 539770 - RNA, 32 nt, Human
uugagcccaggaggcagaggcugcagugagcc

SEQ ID NO: 539771 - RNA, 32 nt, Human
uugagcccaggaggcagagguugcaguaagcc

SEQ ID NO: 539772 - RNA, 32 nt, Human
uugagcccaggaggcagagguugcagugagcc

SEQ ID NO: 539773 - RNA, 32 nt, Human
uugagcccaggaggccaagguugcagugggcc

SEQ ID NO: 539774 - RNA, 32 nt, Human
uugagcccaggaggcggagauugcagugagcc

SEQ ID NO: 539775 - RNA, 32 nt, Human
uugagcccaggaggcggaggcugcagugagcu

SEQ ID NO: 539776 - RNA, 32 nt, Human
uugagcccaggaggcggagguugcagugagcu

SEQ ID NO: 539777 - RNA, 32 nt, Human
uugagcccaggaggcugaggcugcaaugacug

SEQ ID NO: 539778 - RNA, 32 nt, Human
uugagcccaggaggcugaggcugcagugcauc

SEQ ID NO: 539779 - RNA, 32 nt, Human
uugagcccaggaggucaaggcuauggugagcc

SEQ ID NO: 539780 - RNA, 32 nt, Human
uugagcccaggaggucaaggcugcagugagcc

SEQ ID NO: 539781 - RNA, 32 nt, Human
uugagcccaggaggucaaggcugcagugagcu

SEQ ID NO: 539782 - RNA, 32 nt, Human
uugagcccaggaggucagggcugcagugagcc

SEQ ID NO: 539783 - RNA, 32 nt, Human
uugagcccaggaggucgaagcugcagugaggu

SEQ ID NO: 539784 - RNA, 32 nt, Human
uugagcccaggaggucgaggcugcagugagcc

SEQ ID NO: 539785 - RNA, 32 nt, Human
uugagcccaggaggucgaggcugcagugagcu

SEQ ID NO: 539786 - RNA, 32 nt, Human
uugagcccaggaggucgaggcugcagugggcc

SEQ ID NO: 539787 - RNA, 32 nt, Human
uugagcccaggaggucgaggcugcagugugcu

SEQ ID NO: 539788 - RNA, 32 nt, Human
uugagcccaggaggucgagguugcagugagca

SEQ ID NO: 539789 - RNA, 32 nt, Human
uugagcccaggaggucuaggcugcagugagcu

SEQ ID NO: 539790 - RNA, 32 nt, Human
uugagcccaggagguggaggcugcaaugagcu

SEQ ID NO: 539791 - RNA, 32 nt, Human
uugagcccaggagguggagguugcaaugagcc

SEQ ID NO: 539792 - RNA, 32 nt, Human
uugagcccaggagguggagguugcagugagca

SEQ ID NO: 539793 - RNA, 32 nt, Human
uugagcccaggagguggagguugcagugagcc

SEQ ID NO: 539794 - RNA, 32 nt, Human
uugagcccaggagguggagguugcagugagcg

SEQ ID NO: 539795 - RNA, 32 nt, Human
uugagcccaggagguggagguugcagugagcu

SEQ ID NO: 539796 - RNA, 32 nt, Human
uugagcccaggagguugaggcugcagugaacu

SEQ ID NO: 539797 - RNA, 32 nt, Human
uugagcccaggagguugaggcugcagugagca

SEQ ID NO: 539798 - RNA, 32 nt, Human
uugagcccaggagguugaggcugcagugagcc

SEQ ID NO: 539799 - RNA, 32 nt, Human
uugagcccaggagguugaggcugcagugagcu

SEQ ID NO: 539800 - RNA, 32 nt, Human
uugagcccaggagguugaggcugcagugaggu

SEQ ID NO: 539801 - RNA, 32 nt, Human
uugagcccaggagguugaggcugcagugaguu

SEQ ID NO: 539802 - RNA, 32 nt, Human
uugagcccaggagguugaggucacagugagcu

SEQ ID NO: 539803 - RNA, 32 nt, Human
uugagcccaggagguuguggcugcagugagcu

SEQ ID NO: 539804 - RNA, 32 nt, Human
uugagcccaggagucuaggaccagccuggaca

SEQ ID NO: 539805 - RNA, 32 nt, Human
uugagcccaggagucugagaccagccucggca

SEQ ID NO: 539806 - RNA, 32 nt, Human
uugagcccaggagucugagaccagccuggcca

SEQ ID NO: 539807 - RNA, 32 nt, Human
uugagcccaggagucugagaccagccugggca

SEQ ID NO: 539808 - RNA, 32 nt, Human
uugagcccaggagucugaggcuucagugaguu

SEQ ID NO: 539809 - RNA, 32 nt, Human
uugagcccaggagucugaggcuuuagugaucu

SEQ ID NO: 539810 - RNA, 32 nt, Human
uugagcccaggagugcaaggcugcaaugagcc

SEQ ID NO: 539811 - RNA, 32 nt, Human
uugagcccaggaguuaagaggcugcagugacc

SEQ ID NO: 539812 - RNA, 32 nt, Human
uugagcccaggaguuagagaccagcccagccu

SEQ ID NO: 539813 - RNA, 32 nt, Human
uugagcccaggaguuagagaccagccugggca

SEQ ID NO: 539814 - RNA, 32 nt, Human
uugagcccaggaguucaaaaccagccugggca

SEQ ID NO: 539815 - RNA, 32 nt, Human
uugagcccaggaguucaaagcugcagugaguc

SEQ ID NO: 539816 - RNA, 32 nt, Human
uugagcccaggaguucaaagcuguagugagcu

SEQ ID NO: 539817 - RNA, 32 nt, Human
uugagcccaggaguucaacaccagccugagca

SEQ ID NO: 539818 - RNA, 32 nt, Human
uugagcccaggaguucaagaccaaccugguga

SEQ ID NO: 539819 - RNA, 32 nt, Human
uugagcccaggaguucaagaccacccugggca

SEQ ID NO: 539820 - RNA, 32 nt, Human
uugagcccaggaguucaagaccagccugagca

SEQ ID NO: 539821 - RNA, 32 nt, Human
uugagcccaggaguucaagaccagccuggaca

SEQ ID NO: 539822 - RNA, 32 nt, Human
uugagcccaggaguucaagaccagccugggaa

SEQ ID NO: 539823 - RNA, 32 nt, Human
uugagcccaggaguucaagaccagccugggca

SEQ ID NO: 539824 - RNA, 32 nt, Human
uugagcccaggaguucaagaccagccugggcu

SEQ ID NO: 539825 - RNA, 32 nt, Human
uugagcccaggaguucaagaccagcuugggca

SEQ ID NO: 539826 - RNA, 32 nt, Human
uugagcccaggaguucaagaccagucugggca

SEQ ID NO: 539827 - RNA, 32 nt, Human
uugagcccaggaguucaagaccggccugagca

SEQ ID NO: 539828 - RNA, 32 nt, Human
uugagcccaggaguucaaggaugcagugugcu

SEQ ID NO: 539829 - RNA, 32 nt, Human
uugagcccaggaguucaaggcagcaaugagcu

SEQ ID NO: 539830 - RNA, 32 nt, Human
uugagcccaggaguucaaggcuucagugagcc

SEQ ID NO: 539831 - RNA, 32 nt, Human
uugagcccaggaguucagggcugcagugagcc

SEQ ID NO: 539832 - RNA, 32 nt, Human
uugagcccaggaguucagggcugcagugaggu

SEQ ID NO: 539833 - RNA, 32 nt, Human
uugagcccaggaguuccagaccagccuaggca

SEQ ID NO: 539834 - RNA, 32 nt, Human
uugagcccaggaguuccagaccagccugggca

SEQ ID NO: 539835 - RNA, 32 nt, Human
uugagcccaggaguucgaagcugcagggaccu

SEQ ID NO: 539836 - RNA, 32 nt, Human
uugagcccaggaguucgacaccagccuggcca

SEQ ID NO: 539837 - RNA, 32 nt, Human
uugagcccaggaguucgagaccagccggggca

SEQ ID NO: 539838 - RNA, 32 nt, Human
uugagcccaggaguucgagaccagccugaaca

SEQ ID NO: 539839 - RNA, 32 nt, Human
uugagcccaggaguucgagaccagccuggaca

SEQ ID NO: 539840 - RNA, 32 nt, Human
uugagcccaggaguucgagaccagccugggca

SEQ ID NO: 539841 - RNA, 32 nt, Human
uugagcccaggaguucgagaccagcuugggca

SEQ ID NO: 539842 - RNA, 32 nt, Human
uugagcccaggaguucgaggcugcagcgagcc

SEQ ID NO: 539843 - RNA, 32 nt, Human
uugagcccaggaguucgaggcugcagucaguc

SEQ ID NO: 539844 - RNA, 32 nt, Human
uugagcccaggaguucgaggcugcagugagcu

SEQ ID NO: 539845 - RNA, 32 nt, Human
uugagcccaggaguucgagguuacagugaacu

SEQ ID NO: 539846 - RNA, 32 nt, Human
uugagcccaggaguucgauaccagccugggca

SEQ ID NO: 539847 - RNA, 32 nt, Human
uugagcccaggaguucgggaccagccugggaa

SEQ ID NO: 539848 - RNA, 32 nt, Human
uugagcccaggaguucugggcuguagugcacu

SEQ ID NO: 539849 - RNA, 32 nt, Human
uugagcccaggaguugaagaccagccugggca

SEQ ID NO: 539850 - RNA, 32 nt, Human
uugagcccaggaguuggagaccagccuggaua

SEQ ID NO: 539851 - RNA, 32 nt, Human
uugagcccaggaguuggaggccacagugagcu

SEQ ID NO: 539852 - RNA, 32 nt, Human
uugagcccaggaguuggaggccgcagugagcu

SEQ ID NO: 539853 - RNA, 32 nt, Human
uugagcccaggaguuuaaagcugcagugcccu

SEQ ID NO: 539854 - RNA, 32 nt, Human
uugagcccaggaguuuaagaccagccugggca

SEQ ID NO: 539855 - RNA, 32 nt, Human
uugagcccaggaguuuaagguuguagugcgcu

SEQ ID NO: 539856 - RNA, 32 nt, Human
uugagcccaggaguuugaaaccagccugggca

SEQ ID NO: 539857 - RNA, 32 nt, Human
uugagcccaggaguuugaaaccagccugggua

SEQ ID NO: 539858 - RNA, 32 nt, Human
uugagcccaggaguuugaagcugcagugagcu

SEQ ID NO: 539859 - RNA, 32 nt, Human
uugagcccaggaguuugacaccagccugggca

SEQ ID NO: 539860 - RNA, 32 nt, Human
uugagcccaggaguuugagaccagcauggaaa

SEQ ID NO: 539861 - RNA, 32 nt, Human
uugagcccaggaguuugagaccagccagggca

SEQ ID NO: 539862 - RNA, 32 nt, Human
uugagcccaggaguuugagaccagccuaggca

SEQ ID NO: 539863 - RNA, 32 nt, Human
uugagcccaggaguuugagaccagccuggaca

SEQ ID NO: 539864 - RNA, 32 nt, Human
uugagcccaggaguuugagaccagccuggcca

SEQ ID NO: 539865 - RNA, 32 nt, Human
uugagcccaggaguuugagaccagccugggca

SEQ ID NO: 539866 - RNA, 32 nt, Human
uugagcccaggaguuugagaccagccugggua

SEQ ID NO: 539867 - RNA, 32 nt, Human
uugagcccaggaguuugagaccagcuggggca

SEQ ID NO: 539868 - RNA, 32 nt, Human
uugagcccaggaguuugagaccaggcuaggca

SEQ ID NO: 539869 - RNA, 32 nt, Human
uugagcccaggaguuugagacuguagugcacu

SEQ ID NO: 539870 - RNA, 32 nt, Human
uugagcccaggaguuugagccuucagugagcu

SEQ ID NO: 539871 - RNA, 32 nt, Human
uugagcccaggaguuugaggaugcagugagcu

SEQ ID NO: 539872 - RNA, 32 nt, Human
uugagcccaggaguuugaggccagacugcaca

SEQ ID NO: 539873 - RNA, 32 nt, Human
uugagcccaggaguuugaggccagccugggca

SEQ ID NO: 539874 - RNA, 32 nt, Human
uugagcccaggaguuugaggcuacagugagcu

SEQ ID NO: 539875 - RNA, 32 nt, Human
uugagcccaggaguuugaggcugcagugaacu

SEQ ID NO: 539876 - RNA, 32 nt, Human
uugagcccaggaguuugaggcugcagugagcc

SEQ ID NO: 539877 - RNA, 32 nt, Human
uugagcccaggaguuugaggcugcagugagcu

SEQ ID NO: 539878 - RNA, 32 nt, Human
uugagcccaggaguuugaggcugcagugaguu

SEQ ID NO: 539879 - RNA, 32 nt, Human
uugagcccaggaguuugaggcugcggugagcu

SEQ ID NO: 539880 - RNA, 32 nt, Human
uugagcccaggaguuugagggcagccugggaa

SEQ ID NO: 539881 - RNA, 32 nt, Human
uugagcccaggaguuugagguugcagugagcu

SEQ ID NO: 539882 - RNA, 32 nt, Human
uugagcccaggaguuugagguugcagugcacu

SEQ ID NO: 539883 - RNA, 32 nt, Human
uugagcccaggaguuugagguuguagggagcu

SEQ ID NO: 539884 - RNA, 32 nt, Human
uugagcccaggaguuugcgaccagccugggca

SEQ ID NO: 539885 - RNA, 32 nt, Human
uugagcccaggcccacugggacaggguccuca

SEQ ID NO: 539886 - RNA, 32 nt, Human
uugagcccaggccucugguugcaggacucgug

SEQ ID NO: 539887 - RNA, 32 nt, Human
uugagcccaggcgguugaggcugcagugagcc

SEQ ID NO: 539888 - RNA, 32 nt, Human
uugagcccaggcguucaagaccagccugggca

SEQ ID NO: 539889 - RNA, 32 nt, Human
uugagcccagggaggcagagguugcuguaagu

SEQ ID NO: 539890 - RNA, 32 nt, Human
uugagcccagggguucaagaccaaucugggca

SEQ ID NO: 539891 - RNA, 32 nt, Human
uugagcccagggguucgagaccagcuugagca

SEQ ID NO: 539892 - RNA, 32 nt, Human
uugagcccagggguuugagaccagcuugggca

SEQ ID NO: 539893 - RNA, 32 nt, Human
uugagcccagggguuugaggcugcagugagcc

SEQ ID NO: 539894 - RNA, 32 nt, Human
uugagcccaguaggucgaggcugcagugagcu

SEQ ID NO: 539895 - RNA, 32 nt, Human
uugagcccaguaguuugaggcugcagcgaggg

SEQ ID NO: 539896 - RNA, 32 nt, Human
uugagcccaguauuucaagaccagccuaaagg

SEQ ID NO: 539897 - RNA, 32 nt, Human
uugagcccaugagauugaggcugcagugagcu

SEQ ID NO: 539898 - RNA, 32 nt, Human
uugagcccaugaguucaaggcugcagugaguc

SEQ ID NO: 539899 - RNA, 32 nt, Human
uugagcccaugaguuugagaccagccugggua

SEQ ID NO: 539900 - RNA, 32 nt, Human
uugagccccagaggucaaggcugcagugagcu

SEQ ID NO: 539901 - RNA, 32 nt, Human
uugagccccagaguucaagaccagccugggca

SEQ ID NO: 539902 - RNA, 32 nt, Human
uugagccccagggguggaggcugcaaugaacu

SEQ ID NO: 539903 - RNA, 32 nt, Human
uugagccccggaggucgaggcuacagugaccc

SEQ ID NO: 539904 - RNA, 32 nt, Human
uugagccccggaggucgaggcugcagugggcu

SEQ ID NO: 539905 - RNA, 32 nt, Human
uugagccccuuguucauucuccuuccuuuuuc

SEQ ID NO: 539906 - RNA, 32 nt, Human
uugagcccggaaguucgagaccagcuuugggc

SEQ ID NO: 539907 - RNA, 32 nt, Human
uugagcccgggaggcagaggcugcagugaacc

SEQ ID NO: 539908 - RNA, 32 nt, Human
uugagcccgggaggcggagguugcagugagcu

SEQ ID NO: 539909 - RNA, 32 nt, Human
uugagcccgggaggucaagguugcagugaguc

SEQ ID NO: 539910 - RNA, 32 nt, Human
uugagcccgggaggucgaggcuacaguaagcu

SEQ ID NO: 539911 - RNA, 32 nt, Human
uugagcccgggagguugaggcugcaguggggg

SEQ ID NO: 539912 - RNA, 32 nt, Human
uugagcccgugaagucgaggcugcagugagcc

SEQ ID NO: 539913 - RNA, 32 nt, Human
uugagcccuagaggucgaggcugcagugagcu

SEQ ID NO: 539914 - RNA, 32 nt, Human
uugagcccuagagguugaggcugcagugagcu

SEQ ID NO: 539915 - RNA, 32 nt, Human
uugagcccuggagaucgaggcugcaguaagcc

SEQ ID NO: 539916 - RNA, 32 nt, Human
uugagcccuggaggucaaggcugcagugagcc

SEQ ID NO: 539917 - RNA, 32 nt, Human
uugagcccuggagguugaggcugcagugagcu

SEQ ID NO: 539918 - RNA, 32 nt, Human
uugagcccuggaguucaaggcugcagugagcu

SEQ ID NO: 539919 - RNA, 32 nt, Human
uugagcccuuugucccaucccagagcucagag

SEQ ID NO: 539920 - RNA, 32 nt, Human
uugagccgaggaguucaagaccagccugggua

SEQ ID NO: 539921 - RNA, 32 nt, Human
uugagccgaggaguucgagaccagccugggca

SEQ ID NO: 539922 - RNA, 32 nt, Human
uugagccgaggggguggggguugcagugagcc

SEQ ID NO: 539923 - RNA, 32 nt, Human
uugagccgccggccucggccucccaggaagug

SEQ ID NO: 539924 - RNA, 32 nt, Human
uugagccggggagguggaggcugcagugaacu

SEQ ID NO: 539925 - RNA, 32 nt, Human
uugagccuaagagaucaaggcugcagugagcc

SEQ ID NO: 539926 - RNA, 32 nt, Human
uugagccuaagcagucgcggcugcagugaaca

SEQ ID NO: 539927 - RNA, 31 nt, Human
uugagccuacucuugauucaugcagagugcc

SEQ ID NO: 539928 - RNA, 32 nt, Human
uugagccuagaaguucaagaccagccugggca

SEQ ID NO: 539929 - RNA, 32 nt, Human
uugagccuagacguuaaagaccagccugggca

SEQ ID NO: 539930 - RNA, 32 nt, Human
uugagccuagcaguucgagaccagccugggca

SEQ ID NO: 539931 - RNA, 32 nt, Human
uugagccuaggaagucgaggcugcagugagcu

SEQ ID NO: 539932 - RNA, 32 nt, Human
uugagccuaggaauucaagaccagccuaggua

SEQ ID NO: 539933 - RNA, 32 nt, Human
uugagccuaggaggucaaggcugcagugagcc

SEQ ID NO: 539934 - RNA, 32 nt, Human
uugagccuaggaggucgaggcugcagugggau

SEQ ID NO: 539935 - RNA, 32 nt, Human
uugagccuaggagguugaggcugcagugagcu

SEQ ID NO: 539936 - RNA, 32 nt, Human
uugagccuaggaguucgagaccagccuaggca

SEQ ID NO: 539937 - RNA, 32 nt, Human
uugagccuaggaguucgagaccagccugggca

SEQ ID NO: 539938 - RNA, 32 nt, Human
uugagccuaggaguucgagaccagcuuaggca

SEQ ID NO: 539939 - RNA, 32 nt, Human
uugagccuaggaguuuaagaccagccugggca

SEQ ID NO: 539940 - RNA, 32 nt, Human
uugagccuaugaguucaagaccagccuaggca

SEQ ID NO: 539941 - RNA, 32 nt, Human
uugagccuauuaguuggaggcugcaguaagcu

SEQ ID NO: 539942 - RNA, 32 nt, Human
uugagccucuuggaggauggugggagaagugc

SEQ ID NO: 539943 - RNA, 32 nt, Human
uugagccugagaguuugagaccagcccaggca

SEQ ID NO: 539944 - RNA, 32 nt, Human
uugagccugaguucaacacugcagugagcuau

SEQ ID NO: 539945 - RNA, 32 nt, Human
uugagccugcagcagcugcaguaagccaagau

SEQ ID NO: 539946 - RNA, 32 nt, Human
uugagccugcagcucuguaaccacagggcucc

SEQ ID NO: 539947 - RNA, 32 nt, Human
uugagccugcaucuucuugcaucuaaugaaaa

SEQ ID NO: 539948 - RNA, 32 nt, Human
uugagccugcuggccucuugaccucugacccc

SEQ ID NO: 539949 - RNA, 32 nt, Human
uugagccuggaaaagguugcagugagcuggaa

SEQ ID NO: 539950 - RNA, 32 nt, Human
uugagccugggaaguggaggcugcagugagcc

SEQ ID NO: 539951 - RNA, 32 nt, Human
uugagccugggacauugaggcugcagugaacu

SEQ ID NO: 539952 - RNA, 32 nt, Human
uugagccugggagaucgaggcugcagugagcc

SEQ ID NO: 539953 - RNA, 32 nt, Human
uugagccugggagcaaggguugcagugagcug

SEQ ID NO: 539954 - RNA, 32 nt, Human
uugagccugggagcgcagguugcaaugagcca

SEQ ID NO: 539955 - RNA, 32 nt, Human
uugagccugggaggcagaggcugcagugagcc

SEQ ID NO: 539956 - RNA, 32 nt, Human
uugagccugggaggucaaggcugcaguaagcu

SEQ ID NO: 539957 - RNA, 32 nt, Human
uugagccugggaggucaaggcugcagugaacc

SEQ ID NO: 539958 - RNA, 32 nt, Human
uugcgccacuacacuccagccugggugacaga

SEQ ID NO: 539959 - RNA, 32 nt, Human
uugcgccacuacacucuagccugggcaacgag

SEQ ID NO: 539960 - RNA, 32 nt, Human
uugcgccacugcaaaccagccugggcaauaga

SEQ ID NO: 539961 - RNA, 32 nt, Human
uugcgccacugcacaccagucuggagacagag

SEQ ID NO: 539962 - RNA, 32 nt, Human
uugcgccacugcacacuagcuugggugacaga

SEQ ID NO: 539963 - RNA, 32 nt, Human
uugcgccacugcaccccagcaugagcgacaga

SEQ ID NO: 539964 - RNA, 32 nt, Human
uugcgccacugcaccccagcccagugacaggg

SEQ ID NO: 539965 - RNA, 32 nt, Human
uugcgccacugcaccccagcccgggugacaga

SEQ ID NO: 539966 - RNA, 32 nt, Human
uugcgccacugcaccccagccuggacaacaga

SEQ ID NO: 539967 - RNA, 32 nt, Human
uugcgccacugcaccccagccugggcgacaga

SEQ ID NO: 539968 - RNA, 32 nt, Human
uugcgccacugcaccccagccugggugacaga

SEQ ID NO: 539969 - RNA, 32 nt, Human
uugcgccacugcacucaagucugggcgacagg

SEQ ID NO: 539970 - RNA, 32 nt, Human
uugcgccacugcacuccaaccugggcaauaga

SEQ ID NO: 539971 - RNA, 32 nt, Human
uugcgccacugcacuccacccugggugacaga

SEQ ID NO: 539972 - RNA, 32 nt, Human
uugcgccacugcacuccagccagggcgaagga

SEQ ID NO: 539973 - RNA, 32 nt, Human
uugcgccacugcacuccagcccuggcgacaga

SEQ ID NO: 539974 - RNA, 32 nt, Human
uugcgccacugcacuccagccuaggugauaga

SEQ ID NO: 539975 - RNA, 32 nt, Human
uugcgccacugcacuccagccugacgacaaag

SEQ ID NO: 539976 - RNA, 32 nt, Human
uugcgccacugcacuccagccugagcgacaga

SEQ ID NO: 539977 - RNA, 32 nt, Human
uugcgccacugcacuccagccuggcgacagag

SEQ ID NO: 539978 - RNA, 32 nt, Human
uugcgccacugcacuccagccugggagacaga

SEQ ID NO: 539979 - RNA, 32 nt, Human
uugcgccacugcacuccagccugggcaacaag

SEQ ID NO: 539980 - RNA, 32 nt, Human
uugcgccacugcacuccagccugggcaacaga

SEQ ID NO: 539981 - RNA, 32 nt, Human
uugcgccacugcacuccagccugggcaauaga

SEQ ID NO: 539982 - RNA, 32 nt, Human
uugcgccacugcacuccagccugggcagcaga

SEQ ID NO: 539983 - RNA, 32 nt, Human
uugcgccacugcacuccagccugggcgacaga

SEQ ID NO: 539984 - RNA, 32 nt, Human
uugcgccacugcacuccagccugggcgacgga

SEQ ID NO: 539985 - RNA, 32 nt, Human
uugcgccacugcacuccagccugggcuacaga

SEQ ID NO: 539986 - RNA, 32 nt, Human
uugcgccacugcacuccagccugggggacaga

SEQ ID NO: 539987 - RNA, 32 nt, Human
uugcgccacugcacuccagccuggguaacaga

SEQ ID NO: 539988 - RNA, 32 nt, Human
uugcgccacugcacuccagccugggugacaga

SEQ ID NO: 539989 - RNA, 32 nt, Human
uugcgccacugcacuccagccugggugacuga

SEQ ID NO: 539990 - RNA, 32 nt, Human
uugcgccacugcacuccagccugguugacaga

SEQ ID NO: 539991 - RNA, 32 nt, Human
uugcgccacugcacuccagcgcggaagacaga

SEQ ID NO: 539992 - RNA, 32 nt, Human
uugcgccacugcacuccagcgugggcuacaga

SEQ ID NO: 539993 - RNA, 32 nt, Human
uugcgccacugcacuccagucugggcgacaga

SEQ ID NO: 539994 - RNA, 32 nt, Human
uugcgccacugcacuccagucuggucggcaag

SEQ ID NO: 539995 - RNA, 32 nt, Human
uugcgccacugcacucuagccuaagcaaugga

SEQ ID NO: 539996 - RNA, 32 nt, Human
uugcgccacugcacucuagccugggcuacaga

SEQ ID NO: 539997 - RNA, 32 nt, Human
uugcgccacugcacuucagccuggaugacaga

SEQ ID NO: 539998 - RNA, 32 nt, Human
uugcgccacugcacuucagccugggcaacaga

SEQ ID NO: 539999 - RNA, 32 nt, Human
uugcgccacugcaguccgcagcccagccuggg

SEQ ID NO: 540000 - RNA, 32 nt, Human
uugcgccacugcaguccgcaguccagccuggg

SEQ ID NO: 540001 - RNA, 32 nt, Human
uugcgccacugcaguccgcaguccggccuggg

SEQ ID NO: 540002 - RNA, 32 nt, Human
uugcgccacugcaguccgcagucuggccuggg

SEQ ID NO: 540003 - RNA, 32 nt, Human
uugcgccacugcauuccagccugggugacuga

SEQ ID NO: 540004 - RNA, 32 nt, Human
uugcgccacugcauuccagcuugggcgacaga

SEQ ID NO: 540005 - RNA, 32 nt, Human
uugcgccacugcauucuagccugagugacaga

SEQ ID NO: 540006 - RNA, 32 nt, Human
uugcgccacugcauucuagccuggaugacaga

SEQ ID NO: 540007 - RNA, 32 nt, Human
uugcgccacugcgcuccagccugggcaacaga

SEQ ID NO: 540008 - RNA, 32 nt, Human
uugcgccacuggacuccagccugcgugacaga

SEQ ID NO: 540009 - RNA, 32 nt, Human
uugcgccacuguacuccagccuggcaacagag

SEQ ID NO: 540010 - RNA, 32 nt, Human
uugcgccacuguacuccagccugggugacgag

SEQ ID NO: 540011 - RNA, 32 nt, Human
uugcgccacuguacuccagccugggugaggag

SEQ ID NO: 540012 - RNA, 32 nt, Human
uugcgccacuguacuccagcuugggcaacaga

SEQ ID NO: 540013 - RNA, 32 nt, Human
uugcgccacuguacuccaguuuggacuacaga

SEQ ID NO: 540014 - RNA, 32 nt, Human
uugcgccacuucacuccagccugggugacaga

SEQ ID NO: 540015 - RNA, 32 nt, Human
uugcgccagcgggaaccacuaucucugcacuc

SEQ ID NO: 540016 - RNA, 32 nt, Human
uugcgccagugcacuccagcugggcgacagag

SEQ ID NO: 540017 - RNA, 32 nt, Human
uugcgccaugucuccucggggccggcgguugc

SEQ ID NO: 540018 - RNA, 32 nt, Human
uugcgccauugcacuccagccuagguaacaag

SEQ ID NO: 540019 - RNA, 32 nt, Human
uugcgccauugcacuccagccugggcaaaaag

SEQ ID NO: 540020 - RNA, 32 nt, Human
uugcgccauugcacuccagccugggcaacaag

SEQ ID NO: 540021 - RNA, 32 nt, Human
uugcgccauugcacuccagccugggcaacaca

SEQ ID NO: 540022 - RNA, 32 nt, Human
uugcgccauugcacuccagccugggcaacaga

SEQ ID NO: 540023 - RNA, 32 nt, Human
uugcgccauugcacuccagccugggcaacgag

SEQ ID NO: 540024 - RNA, 32 nt, Human
uugcgccauugcacuccagccuggggacaaag

SEQ ID NO: 540025 - RNA, 32 nt, Human
uugcgccauugcacuuaagccuagagacaaga

SEQ ID NO: 540026 - RNA, 32 nt, Human
uugcgccauugcauuccagccugggcaacaag

SEQ ID NO: 540027 - RNA, 32 nt, Human
uugcgccauugcauuccagccugggugacaga

SEQ ID NO: 540028 - RNA, 32 nt, Human
uugcgccauuguacuccagccugggcaacaag

SEQ ID NO: 540029 - RNA, 32 nt, Human
uugcgccauuguacuccagccugggggacagg

SEQ ID NO: 540030 - RNA, 32 nt, Human
uugcgccauugugcuccagccugggugacaaa

SEQ ID NO: 540031 - RNA, 32 nt, Human
uugcgcccccuccccaugaucucccuuuccag

SEQ ID NO: 540032 - RNA, 32 nt, Human
uugcgcccccugcacuccagccugggcuucag

SEQ ID NO: 540033 - RNA, 32 nt, Human
uugcgccccugcacuccaaccuggacaacaca

SEQ ID NO: 540034 - RNA, 32 nt, Human
uugcgccccugccuccuugccaggcucuuccu

SEQ ID NO: 540035 - RNA, 32 nt, Human
uugcgcccuuucucucccucuuggugccccug

SEQ ID NO: 540036 - RNA, 32 nt, Human
uugcgccgcuacauuccagccugggcaacacg

SEQ ID NO: 540037 - RNA, 32 nt, Human
uugcgccgcugcacuccagccugggcaacaga

SEQ ID NO: 540038 - RNA, 32 nt, Human
uugcgccgcugcacuccagccugggcgacaga

SEQ ID NO: 540039 - RNA, 32 nt, Human
uugcgccguuguacuccagccugggcaacaga

SEQ ID NO: 540040 - RNA, 32 nt, Human
uugcgccugcagucccagcuacuugggaggcc

SEQ ID NO: 540041 - RNA, 32 nt, Human
uugcgccuguaaucccagccacucgagaauca

SEQ ID NO: 540042 - RNA, 32 nt, Human
uugcgcgcacacacacauacaagcgggcacga

SEQ ID NO: 540043 - RNA, 32 nt, Human
uugcgcggagagugggcuugacugggcagagc

SEQ ID NO: 540044 - RNA, 32 nt, Human
uugcgcuacuacgcuacagccugggugacagc

SEQ ID NO: 540045 - RNA, 32 nt, Human
uugcgcuacugaacuccagccuggguuacaga

SEQ ID NO: 540046 - RNA, 32 nt, Human
uugcgcuacugcaaucccaccugggcaacaag

SEQ ID NO: 540047 - RNA, 32 nt, Human
uugcgcuacugcacuccagccuaggcaacaga

SEQ ID NO: 540048 - RNA, 32 nt, Human
uugcgcuacugcacuccagccuggacaacaga

SEQ ID NO: 540049 - RNA, 32 nt, Human
uugcgcuacugcacuccagccugggcgacagu

SEQ ID NO: 540050 - RNA, 32 nt, Human
uugcgcuacugcacuccagccugggugacaga

SEQ ID NO: 540051 - RNA, 32 nt, Human
uugcgcucacacuuaagcgucugugacaggag

SEQ ID NO: 540052 - RNA, 32 nt, Human
uugcgcugcugcacuccaaccugggcgacaga

SEQ ID NO: 540053 - RNA, 32 nt, Human
uugcgcuguguaacugcugccagcuucucucu

SEQ ID NO: 540054 - RNA, 32 nt, Human
uugcgcuucagccugggcaacaagagugaaac

SEQ ID NO: 540055 - RNA, 32 nt, Human
uugcgcuucuuggauuuuccaaaggaggugac

SEQ ID NO: 540056 - RNA, 32 nt, Human
uugcggaaagcaucuaggcugaagggugcagg

SEQ ID NO: 540057 - RNA, 32 nt, Human
uugcggacagugcgugagaaaccagcaccccc

SEQ ID NO: 540058 - RNA, 32 nt, Human
uugcggaccaguacuuguuuguccuuaaauac

SEQ ID NO: 540059 - RNA, 32 nt, Human
uugcggacuggccuuguccugaguggccuuag

SEQ ID NO: 540060 - RNA, 18 nt, Human
uugcggagggugcgcuca

SEQ ID NO: 540061 - RNA, 17 nt, Human
uugcggaugcugaugca

SEQ ID NO: 540062 - RNA, 17 nt, Human
uugcggauugccgugca

SEQ ID NO: 540063 - RNA, 32 nt, Human
uugcggcacaaguaccucaucaacuucuaucg

SEQ ID NO: 540064 - RNA, 31 nt, Human
uugcggcacagcuagggcaucccggcgagga

SEQ ID NO: 540065 - RNA, 24 nt, Human
uugcggcauccacgagaccaccuu

SEQ ID NO: 540066 - RNA, 32 nt, Human
uugcggccacacacaacacgcaagcacgccuu

SEQ ID NO: 540067 - RNA, 32 nt, Human
uugcggccccaucagcgaaaaggaggggaggg

SEQ ID NO: 540068 - RNA, 32 nt, Human
uugcggccgcgauucuuccagcaagggauuca

SEQ ID NO: 540069 - RNA, 32 nt, Human
uugcggccuccuggcccggugcagcugcccuc

SEQ ID NO: 540070 - RNA, 25 nt, Human
uugcggccugcccuucaccuccucu

SEQ ID NO: 540071 - RNA, 32 nt, Human
uugcggcggccgcggcagcaugguggugccgg

SEQ ID NO: 540072 - RNA, 32 nt, Human
uugcggcugcagaggacuuccccaaauuuugc

SEQ ID NO: 540073 - RNA, 32 nt, Human
uugcggcuggacgcccagccuggugugcugag

SEQ ID NO: 540074 - RNA, 32 nt, Human
uugcggcugggaagagcggcgagaggguucgg

SEQ ID NO: 540075 - RNA, 32 nt, Human
uugcggcugggcccggggagcagugaguggaa

SEQ ID NO: 540076 - RNA, 32 nt, Human
uugcgggacagaaucagaggacauacaugauu

SEQ ID NO: 540077 - RNA, 32 nt, Human
uugcgggagugaagucccuuggggaggguugc

SEQ ID NO: 540078 - RNA, 32 nt, Human
uugcgggcagucuccccucuccaggccgaggc

SEQ ID NO: 540079 - RNA, 32 nt, Human
uugcgggcaguggacgcgguucugccgagagc

SEQ ID NO: 540080 - RNA, 32 nt, Human
uugcggggagacagcucucucucccaccuccu

SEQ ID NO: 540081 - RNA, 32 nt, Human
uugcggggagagaggucagagccagaugaaaa

SEQ ID NO: 540082 - RNA, 32 nt, Human
uugcggggaggugcggagggagaggggcgggc

SEQ ID NO: 540083 - RNA, 32 nt, Human
uugcgggggauguggaggaaaauuaccaacuu

SEQ ID NO: 540084 - RNA, 32 nt, Human
uugcggggugggagaauguggggugaggguuc

SEQ ID NO: 540085 - RNA, 18 nt, Human
uugcggguggaacaguca

SEQ ID NO: 540086 - RNA, 17 nt, Human
uugcggguucuacauca

SEQ ID NO: 540087 - RNA, 32 nt, Human
uugcggucagggacugaaucuugcccguuuau

SEQ ID NO: 540088 - RNA, 32 nt, Human
uugcggugcagacccucucaggagcaggaaga

SEQ ID NO: 540089 - RNA, 32 nt, Human
uugcggugcucggucgccgccuaggcggggca

SEQ ID NO: 540090 - RNA, 32 nt, Human
uugcgguggcaugacugucaggaggugcuggc

SEQ ID NO: 540091 - RNA, 32 nt, Human
uugcggugguggucgagggaaaaccacugccg

SEQ ID NO: 540092 - RNA, 32 nt, Human
uugcgguuccgaggcagugggaagagaugcgg

SEQ ID NO: 540093 - RNA, 32 nt, Human
uugcguacacagagaaggcuauguaaacaaac

SEQ ID NO: 540094 - RNA, 32 nt, Human
uugcguagcccugggagccaccuugcuucugg

SEQ ID NO: 540095 - RNA, 32 nt, Human
uugcguagcuucaaaaaggcguaacagugacc

SEQ ID NO: 540096 - RNA, 32 nt, Human
uugcgucacugaacuccggccugggugacaga

SEQ ID NO: 540097 - RNA, 32 nt, Human
uugcgucacugcacuccaaccugggugacaga

SEQ ID NO: 540098 - RNA, 32 nt, Human
uugcgucacugcacuccagccugagcaacaga

SEQ ID NO: 540099 - RNA, 32 nt, Human
uugcgucacugcacuccagccugggcgacaga

SEQ ID NO: 540100 - RNA, 32 nt, Human
uugcgucacugcacugcagccugggugacaga

SEQ ID NO: 540101 - RNA, 32 nt, Human
uugcgucccuuggacugccuguugauugaugg

SEQ ID NO: 540102 - RNA, 32 nt, Human
uugcguccucaccucucacccucuccuucccg

SEQ ID NO: 540103 - RNA, 32 nt, Human
uugcguccuuucucuucuccgccauggaauuc

SEQ ID NO: 540104 - RNA, 32 nt, Human
uugcgucuuagcagugauuuuuauccaaucuu

SEQ ID NO: 540105 - RNA, 32 nt, Human
uugcgugaugcugagguuuggggugcgaauga

SEQ ID NO: 540106 - RNA, 32 nt, Human
uugcgugcagccugugugugugcuggcacaag

SEQ ID NO: 540107 - RNA, 32 nt, Human
uugcgugccuguagucccagcuacuugggagg

SEQ ID NO: 540108 - RNA, 22 nt, Human
uugcguggggagacacagugga

SEQ ID NO: 540109 - RNA, 32 nt, Human
uugcguggggcauguaggugggggaggcgucu

SEQ ID NO: 540110 - RNA, 32 nt, Human
uugcguguccagccccuccagacaccaccacu

SEQ ID NO: 540111 - RNA, 32 nt, Human
uugcgugugguguucaggacuguuccuuggug

SEQ ID NO: 540112 - RNA, 32 nt, Human
uugcguuaucugcagugcggccugagguuacg

SEQ ID NO: 540113 - RNA, 32 nt, Human
uugcguugauacuuugccccagaaaggccugg

SEQ ID NO: 540114 - RNA, 32 nt, Human
uugcguugcucaaaucacuagcacagagguuc

SEQ ID NO: 540115 - RNA, 32 nt, Human
uugcguuggucugcggcguuuccccagcagac

SEQ ID NO: 540116 - RNA, 32 nt, Human
uugcuaaaaaggauuuucuuaacucagauuuu

SEQ ID NO: 540117 - RNA, 32 nt, Human
uugcuaaaaaguuauugaauacauuuguuucu

SEQ ID NO: 540118 - RNA, 32 nt, Human
uugcuaaaaccucaauuuaagucuuuaaaagg

SEQ ID NO: 540119 - RNA, 32 nt, Human
uugcuaaaagugaaagucaucuagcauucuua

SEQ ID NO: 540120 - RNA, 32 nt, Human
uugcuaaaccaaggaggcagaccucauguuug

SEQ ID NO: 540121 - RNA, 32 nt, Human
uugcuaaacccagagacacugcaccugaaucc

SEQ ID NO: 540122 - RNA, 32 nt, Human
uugcuaaaccucuccucugacugccuuuauua

SEQ ID NO: 540123 - RNA, 32 nt, Human
uugcuaaauuucuuaucuuuacacucuaaagc

SEQ ID NO: 540124 - RNA, 32 nt, Human
uugcuaaauuuguauucucugugaauuucacu

SEQ ID NO: 540125 - RNA, 32 nt, Human
uugcuaaauuuuucuuugagguucuccugaau

SEQ ID NO: 540126 - RNA, 32 nt, Human
uugcuaacagaaguggccuguaagcuccugug

SEQ ID NO: 540127 - RNA, 32 nt, Human
uugcuaacaggauaugggcuaccaggaagaag

SEQ ID NO: 540128 - RNA, 32 nt, Human
uugcuaacauggugaaaccccgucucuacuaa

SEQ ID NO: 540129 - RNA, 32 nt, Human
uugcuaacauguuuuuauuuuucacuguaaau

SEQ ID NO: 540130 - RNA, 32 nt, Human
uugcuaaccuaaaagacagcagggacaagaua

SEQ ID NO: 540131 - RNA, 32 nt, Human
uugcuaaccugacauuuacuucaauuuuucuu

SEQ ID NO: 540132 - RNA, 32 nt, Human
uugcuaacucuggauaacacuuggggacuuga

SEQ ID NO: 540133 - RNA, 32 nt, Human
uugcuaacuuaggguuuugagcagguuggggu

SEQ ID NO: 540134 - RNA, 32 nt, Human
uugcuaagaaagcaaugucuuccuucauccuu

SEQ ID NO: 540135 - RNA, 32 nt, Human
uugcuaagccaagaaggaacuuucccacacua

SEQ ID NO: 540136 - RNA, 32 nt, Human
uugcuaagguuuaggaaggcaaguaugauucu

SEQ ID NO: 540137 - RNA, 20 nt, Human
uugcuaaguguaacuguauc

SEQ ID NO: 540138 - RNA, 32 nt, Human
uugcuaaucugcuuugugugacagcauuccag

SEQ ID NO: 540139 - RNA, 32 nt, Human
uugcuacaaucuugaccccuuugcuacauucc

SEQ ID NO: 540140 - RNA, 32 nt, Human
uugcuacagagauguuuauucuaaauuuaaau

SEQ ID NO: 540141 - RNA, 32 nt, Human
uugcuacagcaaccccagcucugcaggguguc

SEQ ID NO: 540142 - RNA, 32 nt, Human
uugcuacaggaauggaauaagcuuaaacaugu

SEQ ID NO: 540143 - RNA, 32 nt, Human
uugcuacagguggguccagcugcccaggucau

SEQ ID NO: 540144 - RNA, 31 nt, Human
uugcuacaguauuucugacauuuagaguagu

SEQ ID NO: 540145 - RNA, 32 nt, Human
uugcuacaguuuaucuagguugcaguggcauc

SEQ ID NO: 540146 - RNA, 32 nt, Human
uugcuacauaagauugcaagacuugccaagaa

SEQ ID NO: 540147 - RNA, 32 nt, Human
uugcuaccagggaguauucuuuggauaagcaa

SEQ ID NO: 540148 - RNA, 32 nt, Human
uugcuaccauuucuagagagagaggacacagu

SEQ ID NO: 540149 - RNA, 21 nt, Human
uugcuacccuucggacaagug

SEQ ID NO: 540150 - RNA, 32 nt, Human
uugcuaccgagaagguuggagguggggaaggc

SEQ ID NO: 540151 - RNA, 32 nt, Human
uugcuaccugucaacaugaauguuucugugag

SEQ ID NO: 540152 - RNA, 32 nt, Human
uugcuacucgaaggugccagaaugacacaaag

SEQ ID NO: 540153 - RNA, 32 nt, Human
uugcuacugcuacugauuuuggaggaaauuuu

SEQ ID NO: 540154 - RNA, 32 nt, Human
uugcuacugcugugggggcaugugggugggua

SEQ ID NO: 540155 - RNA, 32 nt, Human
uugcuagagacagcguuucucuguguugauca

SEQ ID NO: 540156 - RNA, 32 nt, Human
uugcuagagacagggauucgccauguuggcca

SEQ ID NO: 540157 - RNA, 32 nt, Human
uugcuagagcugcggcauucuccugggucucg

SEQ ID NO: 540158 - RNA, 32 nt, Human
uugcuagaggggcacauggagugggacaggag

SEQ ID NO: 540159 - RNA, 32 nt, Human
uugcuagcaaggcugagcacuuuuccauguga

SEQ ID NO: 540160 - RNA, 32 nt, Human
uugcuagcaguggaagggucacagaccaaaca

SEQ ID NO: 540161 - RNA, 22 nt, Human
uugcuagcauguuaugauuuca

SEQ ID NO: 540162 - RNA, 32 nt, Human
uugcuagcucagugaggggaauucuuccagaa

SEQ ID NO: 540163 - RNA, 32 nt, Human
uugcuagcucccucccuccuccugggugcuga

SEQ ID NO: 540164 - RNA, 32 nt, Human
uugcuaggacagaaacuguaaaaagaaaguaa

SEQ ID NO: 540165 - RNA, 32 nt, Human
uugcuaggacucaugggggagcccccagcucu

SEQ ID NO: 540166 - RNA, 32 nt, Human
uugcuaggagaagggaagacgcccgagacgcu

SEQ ID NO: 540167 - RNA, 32 nt, Human
uugcuaggcccaccuuuggccucccagcggcu

SEQ ID NO: 540168 - RNA, 20 nt, Human
uugcuaggcuggagugcagu

SEQ ID NO: 540169 - RNA, 32 nt, Human
uugcuaggcuuagcgggucuggcugcuggggg

SEQ ID NO: 540170 - RNA, 32 nt, Human
uugcuagggacugauguuauguucgacucagc

SEQ ID NO: 540171 - RNA, 32 nt, Human
uugcuaggggcaggaucucauucaggcugccc

SEQ ID NO: 540172 - RNA, 32 nt, Human
uugcuaggggcccugaccuggggugucaugac

SEQ ID NO: 540173 - RNA, 32 nt, Human
uugcuaguaggugaggcgagucucuaacugau

SEQ ID NO: 540174 - RNA, 32 nt, Human
uugcuagucaggggcuugguucucccacuuac

SEQ ID NO: 540175 - RNA, 24 nt, Human
uugcuagucuacaaaacuaggaca

SEQ ID NO: 540176 - RNA, 32 nt, Human
uugcuagucugcuucugagccauugucauauc

SEQ ID NO: 540177 - RNA, 32 nt, Human
uugcuagugagcaagcuuggucaaaguguaug

SEQ ID NO: 540178 - RNA, 32 nt, Human
uugcuagugggaagaaaaauagcugagcuuuc

SEQ ID NO: 540179 - RNA, 32 nt, Human
uugcuagugucacccaggcuggagugcaguga

SEQ ID NO: 540180 - RNA, 32 nt, Human
uugcuaguguugcccaggcuggagugcagugg

SEQ ID NO: 540181 - RNA, 32 nt, Human
uugcuauaagccaaggcuacugagugauacug

SEQ ID NO: 540182 - RNA, 32 nt, Human
uugcuauauggaaggcacauuuuugcacuaua

SEQ ID NO: 540183 - RNA, 32 nt, Human
uugcuauauugcucggagguuugcuaaaacuc

SEQ ID NO: 540184 - RNA, 32 nt, Human
uugcuaucauuuaccauggauuuccuacauuu

SEQ ID NO: 540185 - RNA, 32 nt, Human
uugcuaucggugguagaaguguugccauucac

SEQ ID NO: 540186 - RNA, 32 nt, Human
uugcuaucugggcugaguggccagggccaucc

SEQ ID NO: 540187 - RNA, 32 nt, Human
uugcuaucuuuccucugcucauggcauauaaa

SEQ ID NO: 540188 - RNA, 32 nt, Human
uugcuaugucauuccaucuuuuggaaggcagu

SEQ ID NO: 540189 - RNA, 32 nt, Human
uugcuaugucuuuuuaaaugguccauuuucaa

SEQ ID NO: 540190 - RNA, 32 nt, Human
uugcuauucugcgcccccuccuaccuugcgcu

SEQ ID NO: 540191 - RNA, 32 nt, Human
uugcuauugaaggaagcagugauggugaauuu

SEQ ID NO: 540192 - RNA, 32 nt, Human
uugcuauuguguuauuuuacuacuucucucug

SEQ ID NO: 540193 - RNA, 32 nt, Human
uugcuauuuucaaaugagaaaaucaagcaaag

SEQ ID NO: 540194 - RNA, 32 nt, Human
uugcuauuuuuccucuucaauuuccuucaauc

SEQ ID NO: 540195 - RNA, 32 nt, Human
uugcucaaaauggaauuccucuaagaaucaag

SEQ ID NO: 540196 - RNA, 32 nt, Human
uugcucaagcaaccugcugccuccacccagag

SEQ ID NO: 540197 - RNA, 32 nt, Human
uugcucaagcuggucucaagcuccugggcuca

SEQ ID NO: 540198 - RNA, 32 nt, Human
uugcucaagugccagagguugggagaaggauu

SEQ ID NO: 540199 - RNA, 32 nt, Human
uugcucacacacccuucacugcucuguaccca

SEQ ID NO: 540200 - RNA, 32 nt, Human
uugcucacacccuugguguucaggugagccgg

SEQ ID NO: 540201 - RNA, 32 nt, Human
uugcucacaccuguaucccagcacuuugggag

SEQ ID NO: 540202 - RNA, 32 nt, Human
uugcucacaguuacucauaacuacccauugac

SEQ ID NO: 540203 - RNA, 32 nt, Human
uugcucacaguuauuacauacacaucagccau

SEQ ID NO: 540204 - RNA, 32 nt, Human
uugcucaccauugcguggcuccaggcucaugu

SEQ ID NO: 540205 - RNA, 32 nt, Human
uugcucacccagacaccaugugcaaugacauu

SEQ ID NO: 540206 - RNA, 32 nt, Human
uugcucaccucccucucucuugcuucauuugg

SEQ ID NO: 540207 - RNA, 32 nt, Human
uugcucaccuggccacugcugccuuauccauu

SEQ ID NO: 540208 - RNA, 32 nt, Human
uugcucacgccuguaaucccagaacuuuagga

SEQ ID NO: 540209 - RNA, 32 nt, Human
uugcucacgccuguaaucccagcacuuuggga

SEQ ID NO: 540210 - RNA, 32 nt, Human
uugcucacgccuguaaucccagcacuuuucag

SEQ ID NO: 540211 - RNA, 32 nt, Human
uugcucacucuauccuggauaggcacuuggga

SEQ ID NO: 540212 - RNA, 32 nt, Human
uugcucacugaaucuguuggggagaggucacc

SEQ ID NO: 540213 - RNA, 32 nt, Human
uugcucacugaggauguuggggaagggacgaa

SEQ ID NO: 540214 - RNA, 32 nt, Human
uugcucacugcaacauccaccucaugggcuca

SEQ ID NO: 540215 - RNA, 32 nt, Human
uugcucacugcaaccucugccacccggguuca

SEQ ID NO: 540216 - RNA, 32 nt, Human
uugcucacugcagugggcccagccuggucuag

SEQ ID NO: 540217 - RNA, 32 nt, Human
uugcucacuguagccucgaauuccugggcuca

SEQ ID NO: 540218 - RNA, 32 nt, Human
uugcucacugugguaauuaccaguguguuuau

SEQ ID NO: 540219 - RNA, 32 nt, Human
uugcucagagucccagguccuggccugacccu

SEQ ID NO: 540220 - RNA, 32 nt, Human
uugcucagcaccguuucuccaucaaugccgug

SEQ ID NO: 540221 - RNA, 32 nt, Human
uugcucagcugagugugggaacaguccagccc

SEQ ID NO: 540222 - RNA, 32 nt, Human
uugcucagcuucuggggaggccucagggagau

SEQ ID NO: 540223 - RNA, 32 nt, Human
uugcucaggaugucgacagcuguggcuuccuu

SEQ ID NO: 540224 - RNA, 21 nt, Human
uugcucaggcuggaguacagu

SEQ ID NO: 540225 - RNA, 24 nt, Human
uugcucaggcuggaguacaguggc

SEQ ID NO: 540226 - RNA, 21 nt, Human
uugcucaggcuggagugcagu

SEQ ID NO: 540227 - RNA, 22 nt, Human
uugcucaggcuggagugcagug

SEQ ID NO: 540228 - RNA, 32 nt, Human
uugcucaggcuggagugcaguggugugaucuc

SEQ ID NO: 540229 - RNA, 32 nt, Human
uugcucaggcuggauugcaguggcgugaucau

SEQ ID NO: 540230 - RNA, 32 nt, Human
uugcucaggcuggucugaaacuccuggccuga

SEQ ID NO: 540231 - RNA, 32 nt, Human
uugcucagggcagcuucugcccagggugggug

SEQ ID NO: 540232 - RNA, 32 nt, Human
uugcucagggcugucugugcugcuccucacca

SEQ ID NO: 540233 - RNA, 32 nt, Human
uugcucaguacaacagucuugcauucagcagg

SEQ ID NO: 540234 - RNA, 32 nt, Human
uugcucagugccugagauugaaaaagucaaca

SEQ ID NO: 540235 - RNA, 32 nt, Human
uugcucagugcugaagugggguucucauuccg

SEQ ID NO: 540236 - RNA, 32 nt, Human
uugcucaguggcucugagacuguggauguccu

SEQ ID NO: 540237 - RNA, 32 nt, Human
uugcucagugucuggcugcagagcagugggcc

SEQ ID NO: 540238 - RNA, 30 nt, Human
uugcucaguuucucaacagaaagacucaua

SEQ ID NO: 540239 - RNA, 32 nt, Human
uugcucaucucccaggagagucucguccaaag

SEQ ID NO: 540240 - RNA, 32 nt, Human
uugcucaucuuuaugccccagcacuagguacg

SEQ ID NO: 540241 - RNA, 32 nt, Human
uugcucaugccuauaaucccagcacuuuagga

SEQ ID NO: 540242 - RNA, 32 nt, Human
uugcucaugccugucaguaucagugcuuccau

SEQ ID NO: 540243 - RNA, 32 nt, Human
uugcucauggaguugcaguucuugccuaacag

SEQ ID NO: 540244 - RNA, 32 nt, Human
uugcuccacagcuguagcucugggcugacgcc

SEQ ID NO: 540245 - RNA, 32 nt, Human
uugcuccagaugagucagugaguggugaauga

SEQ ID NO: 540246 - RNA, 32 nt, Human
uugcuccagcccaggcuggagugcaguggcau

SEQ ID NO: 540247 - RNA, 32 nt, Human
uugcuccagcuggucucaaacugcugggcuua

SEQ ID NO: 540248 - RNA, 32 nt, Human
uugcuccaguauguguaccaucuuguaaauuc

SEQ ID NO: 540249 - RNA, 23 nt, Human
uugcuccaguuuuacuacuugca

SEQ ID NO: 540250 - RNA, 32 nt, Human
uugcuccaucauaucaagacaaacauguuaga

SEQ ID NO: 540251 - RNA, 32 nt, Human
uugcuccaucuauuauugcuucuccauccugg

SEQ ID NO: 540252 - RNA, 32 nt, Human
uugcuccauugcacuccagccugggcaacgag

SEQ ID NO: 540253 - RNA, 32 nt, Human
uugcuccauugcacuccagccugggcgauaga

SEQ ID NO: 540254 - RNA, 32 nt, Human
uugcucccaagaggaggagagggaggcugcag

SEQ ID NO: 540255 - RNA, 32 nt, Human
uugcucccagacccucugaucucccuccaaca

SEQ ID NO: 540256 - RNA, 32 nt, Human
uugcucccagccuggcuccaucagccuccagc

SEQ ID NO: 540257 - RNA, 23 nt, Human
uugcucccaggcuggaaugcagu

SEQ ID NO: 540258 - RNA, 24 nt, Human
uugcucccaggcuggaaugcagug

SEQ ID NO: 540259 - RNA, 32 nt, Human
uugcucccauccugagccuccucugccccugu

SEQ ID NO: 540260 - RNA, 32 nt, Human
uugcuccccauugccacccacagugcccggaa

SEQ ID NO: 540261 - RNA, 32 nt, Human
uugcuccccgcuguagcccacagccauaucug

SEQ ID NO: 540262 - RNA, 32 nt, Human
uugcuccccucccuuacuccucccucugcugc

SEQ ID NO: 540263 - RNA, 32 nt, Human
uugcuccccuggaagacaggagaagcugggga

SEQ ID NO: 540264 - RNA, 32 nt, Human
uugcucccuagccugcaaggcuagcuccccug

SEQ ID NO: 540265 - RNA, 32 nt, Human
uugcucccucagagguggaggugaggggaaag

SEQ ID NO: 540266 - RNA, 32 nt, Human
uugcucccuccuagcugggagugacggguggg

SEQ ID NO: 540267 - RNA, 32 nt, Human
uugcucccucuuuugaggguaaagcuacuguc

SEQ ID NO: 540268 - RNA, 32 nt, Human
uugcucccugcucuuucugccucugggcucau

SEQ ID NO: 540269 - RNA, 32 nt, Human
uugcucccugggaacauuguccuuuccccacg

SEQ ID NO: 540270 - RNA, 32 nt, Human
uugcucccuuucucucucuguccuucccuucc

SEQ ID NO: 540271 - RNA, 19 nt, Human
uugcuccgcgccugagcca

SEQ ID NO: 540272 - RNA, 32 nt, Human
uugcuccgggacugaagaaucuccucacgugg

SEQ ID NO: 540273 - RNA, 32 nt, Human
uugcuccguugccuagcuggagugcacgaucu

SEQ ID NO: 540274 - RNA, 24 nt, Human
uugcuccuagaauuuuugucuuca

SEQ ID NO: 540275 - RNA, 32 nt, Human
uugcuccucacccaggcuggaaugcaguggug

SEQ ID NO: 540276 - RNA, 32 nt, Human
uugcuccuccagggcagcaccaugcagccccu

SEQ ID NO: 540277 - RNA, 32 nt, Human
uugcuccuccauccucauucucucaccaccag

SEQ ID NO: 540278 - RNA, 18 nt, Human
uugcuccucugggacuuu

SEQ ID NO: 540279 - RNA, 18 nt, Human
uugcuccugaacaucucu

SEQ ID NO: 540280 - RNA, 32 nt, Human
uugcuccugcaaccaguaucuccuuggaauuc

SEQ ID NO: 540281 - RNA, 32 nt, Human
uugcuccuggaagcucuguccagggaauugcu

SEQ ID NO: 540282 - RNA, 32 nt, Human
uugcuccuggucucccgccucucccaggcgac

SEQ ID NO: 540283 - RNA, 32 nt, Human
uugcuccuguaauuuuggccuuucgagugccu

SEQ ID NO: 540284 - RNA, 22 nt, Human
uugcuccugucgcccaggcugg

SEQ ID NO: 540285 - RNA, 32 nt, Human
uugcuccugucgcccaggcuggagugcaaugg

SEQ ID NO: 540286 - RNA, 32 nt, Human
uugcuccuguucugucacuugucauggucuuu

SEQ ID NO: 540287 - RNA, 32 nt, Human
uugcuccuucaagggacauuuggccaagucug

SEQ ID NO: 540288 - RNA, 32 nt, Human
uugcuccuucucaccuccucucaggccuaucu

SEQ ID NO: 540289 - RNA, 32 nt, Human
uugcuccuugcucucccaggaucaauuguauc

SEQ ID NO: 540290 - RNA, 32 nt, Human
uugcucgagauggaucugcccgugggccccgg

SEQ ID NO: 540291 - RNA, 32 nt, Human
uugcucgcgcgacaaguaguugcugggacagc

SEQ ID NO: 540292 - RNA, 32 nt, Human
uugcucggcccaggucuguuucaggcaucuga

SEQ ID NO: 540293 - RNA, 32 nt, Human
uugcucggcguugaggcuguggggaagaugcc

SEQ ID NO: 540294 - RNA, 32 nt, Human
uugcucgucacccaggcuggagugcaauugug

SEQ ID NO: 540295 - RNA, 32 nt, Human
uugcucuaacccggcuacagaagugaccacag

SEQ ID NO: 540296 - RNA, 32 nt, Human
uugcucuaccuggccgguaggcugcuggcgcc

SEQ ID NO: 540297 - RNA, 32 nt, Human
uugcucuaccugugcaugaagcacuugacgga

SEQ ID NO: 540298 - RNA, 25 nt, Human
uugcucuagagagaagcaaguggug

SEQ ID NO: 540299 - RNA, 32 nt, Human
uugcucuaggagcugaguugcugguuuggaag

SEQ ID NO: 540300 - RNA, 21 nt, Human
uugcucuagggaagcagugcg

SEQ ID NO: 540301 - RNA, 32 nt, Human
uugcucucaaacuccugaccucaggugaucca

SEQ ID NO: 540302 - RNA, 32 nt, Human
uugcucuccagccugggcgacaagagcgaaac

SEQ ID NO: 540303 - RNA, 32 nt, Human
uugcucucccaggcuggagugcagugguguaa

SEQ ID NO: 540304 - RNA, 32 nt, Human
uugcucuccccucuucucaagugccuuaauag

SEQ ID NO: 540305 - RNA, 32 nt, Human
uugcucucccucccgcuuccucccucccaucu

SEQ ID NO: 540306 - RNA, 32 nt, Human
uugcucucccuugcucuuccccaaacugaaaa

SEQ ID NO: 540307 - RNA, 32 nt, Human
uugcucuccuccacaucagcucccucuccucc

SEQ ID NO: 540308 - RNA, 19 nt, Human
uugcucuccuucugaguca

SEQ ID NO: 540309 - RNA, 32 nt, Human
uugcucucgcccaggcuggagugcagugggug

SEQ ID NO: 540310 - RNA, 32 nt, Human
uugcucucggaggccagggaagaugguacuua

SEQ ID NO: 540311 - RNA, 32 nt, Human
uugcucucugaacaaaaauuaucuucaauuua

SEQ ID NO: 540312 - RNA, 32 nt, Human
uugcucucuggagcuuacuaugugcugguacu

SEQ ID NO: 540313 - RNA, 17 nt, Human
uugcucucuugggccuu

SEQ ID NO: 540314 - RNA, 32 nt, Human
uugcucucuuuaccagacaggcagcaggaguc

SEQ ID NO: 540315 - RNA, 32 nt, Human
uugcucucuuucucccuccccuaccagccuca

SEQ ID NO: 540316 - RNA, 32 nt, Human
uugcucugaaggaggagcaggugaaacaggug

SEQ ID NO: 540317 - RNA, 18 nt, Human
uugcucugaaucacugug

SEQ ID NO: 540318 - RNA, 32 nt, Human
uugcucugaccuccucugggcccugucgcccc

SEQ ID NO: 540319 - RNA, 24 nt, Human
uugcucugagacacaaagugugua

SEQ ID NO: 540320 - RNA, 32 nt, Human
uugcucugcaauauuuacuuuacccuguuaau

SEQ ID NO: 540321 - RNA, 23 nt, Human
uugcucugcuccucagccuugca

SEQ ID NO: 540322 - RNA, 32 nt, Human
uugcucuggagagucccugcagagccacuggc

SEQ ID NO: 540323 - RNA, 21 nt, Human
uugcucugggacaccucccug

SEQ ID NO: 540324 - RNA, 32 nt, Human
uugcucugggacuuuuaugcucccagaggccc

SEQ ID NO: 540325 - RNA, 32 nt, Human
uugcucugggagaaugcauucuaaauuauaug

SEQ ID NO: 540326 - RNA, 20 nt, Human
uugcucugggagacuuacug

SEQ ID NO: 540327 - RNA, 32 nt, Human
uugcucuggggaaagccagcugccaucaggug

SEQ ID NO: 540328 - RNA, 32 nt, Human
uugcucugguccaggagcccacgguggggugc

SEQ ID NO: 540329 - RNA, 19 nt, Human
uugcucugguggcacugug

SEQ ID NO: 540330 - RNA, 32 nt, Human
uugcucugguugcccaggcugggguacagugg

SEQ ID NO: 540331 - RNA, 32 nt, Human
uugcucugucaccaggccggagugcaguggug

SEQ ID NO: 540332 - RNA, 32 nt, Human
uugcucugucaccaggcuggagggcaguggcg

SEQ ID NO: 540333 - RNA, 32 nt, Human
uugcucugucaccaggcuggagugcagcggcg

SEQ ID NO: 540334 - RNA, 32 nt, Human
uugcucugucaccaggcuggagugcaguggag

SEQ ID NO: 540335 - RNA, 32 nt, Human
uugcucugucaccaggcuggagugcaguggca

SEQ ID NO: 540336 - RNA, 32 nt, Human
uugcucugucaccaggcuggagugcgguggca

SEQ ID NO: 540337 - RNA, 32 nt, Human
uugcucugucagagcacagaggaggcucauau

SEQ ID NO: 540338 - RNA, 32 nt, Human
uugcucugucaucaggcuggagugcaguggcg

SEQ ID NO: 540339 - RNA, 32 nt, Human
uugcucugucaucaggcuggagugcaguggcu

SEQ ID NO: 540340 - RNA, 32 nt, Human
uugcucugucaugcaggcuggagugcgguggu

SEQ ID NO: 540341 - RNA, 32 nt, Human
uugcucugucgccaaguuggagugcaauggug

SEQ ID NO: 540342 - RNA, 32 nt, Human
uugcucugucgccagacuggagugcaguggcg

SEQ ID NO: 540343 - RNA, 32 nt, Human
uugcucugucgccaggcuggagugcaauggcg

SEQ ID NO: 540344 - RNA, 32 nt, Human
uugcucugucgccaggcuggagugcaguggcg

SEQ ID NO: 540345 - RNA, 32 nt, Human
uugcucugugacccagguugcagugagccaag

SEQ ID NO: 540346 - RNA, 32 nt, Human
uugcucuguugccaaguuaagugcagugguau

SEQ ID NO: 540347 - RNA, 32 nt, Human
uugcucuguugcccagcuggagugcaguggug

SEQ ID NO: 540348 - RNA, 32 nt, Human
uugcucuguugccccaggcuggagugcagugg

SEQ ID NO: 540349 - RNA, 32 nt, Human
uugcucuguugccugggcuggagugcagugcc

SEQ ID NO: 540350 - RNA, 32 nt, Human
uugcucuguuguguccuguugccggcucuggc

SEQ ID NO: 540351 - RNA, 22 nt, Human
uugcucuguuuauuguaaugua

SEQ ID NO: 540352 - RNA, 22 nt, Human
uugcucuguuuugguaccugua

SEQ ID NO: 540353 - RNA, 32 nt, Human
uugcucuuaacuucaccgccuaacccaaaacc

SEQ ID NO: 540354 - RNA, 32 nt, Human
uugcucuuacccaggcugagugcaguggcaga

SEQ ID NO: 540355 - RNA, 32 nt, Human
uugcucuuauugcccaggcuggagugcagugg

SEQ ID NO: 540356 - RNA, 32 nt, Human
uugcucuuccuuccaagaaccuucgagaucug

SEQ ID NO: 540357 - RNA, 32 nt, Human
uugcucuuccuucugacuucuuccucauuucu

SEQ ID NO: 540358 - RNA, 32 nt, Human
uugcucuucucaucuuuuccaacaguguucuc

SEQ ID NO: 540359 - RNA, 32 nt, Human
uugcucuugcacuccauccuggacaacagagu

SEQ ID NO: 540360 - RNA, 32 nt, Human
uugcucuugcccaggcaggaguacaguagugc

SEQ ID NO: 540361 - RNA, 32 nt, Human
uugcucuugcugcccaggcuagagugcaaugg

SEQ ID NO: 540362 - RNA, 32 nt, Human
uugcucuuguaaguccuuccucuggggaagug

SEQ ID NO: 540363 - RNA, 32 nt, Human
uugcucuuguagcccaggcuggagugcaaugg

SEQ ID NO: 540364 - RNA, 32 nt, Human
uugcucuuguagcccaggcugggaugcaaugg

SEQ ID NO: 540365 - RNA, 32 nt, Human
uugcucuugucacccaggcuggagugcaaugg

SEQ ID NO: 540366 - RNA, 32 nt, Human
uugcucuugucacccaggcuggagugcagugg

SEQ ID NO: 540367 - RNA, 32 nt, Human
uugcucuugucgcccaggcuggagugcaaugg

SEQ ID NO: 540368 - RNA, 32 nt, Human
uugcucuugucgcccaggcuggagugcagugg

SEQ ID NO: 540369 - RNA, 32 nt, Human
uugcucuugucucccaggcuggagugcaguga

SEQ ID NO: 540370 - RNA, 32 nt, Human
uugcucuuguuacccaggcaggagugcagugg

SEQ ID NO: 540371 - RNA, 32 nt, Human
uugcucuuguuacccaggcuggagugcagugg

SEQ ID NO: 540372 - RNA, 32 nt, Human
uugcucuuguuccccaggcuggagugcaaugg

SEQ ID NO: 540373 - RNA, 32 nt, Human
uugcucuuguugcccaggcuggagggcaaugg

SEQ ID NO: 540374 - RNA, 32 nt, Human
uugcucuuguugcccaggcuggaguacaaugg

SEQ ID NO: 540375 - RNA, 32 nt, Human
uugcucuuguugcccaggcuggagugcaauag

SEQ ID NO: 540376 - RNA, 32 nt, Human
uugcucuuguugcccaggcuggagugcaauga

SEQ ID NO: 540377 - RNA, 32 nt, Human
uugcucuuguugcccaggcuggagugcaaugg

SEQ ID NO: 540378 - RNA, 32 nt, Human
uugcucuuguugcccaggcuggagugcaguga

SEQ ID NO: 540379 - RNA, 32 nt, Human
uugcucuuguugcccaggcuggagugcagugg

SEQ ID NO: 540380 - RNA, 32 nt, Human
uugcucuuguugcccaggcuggagugugaugg

SEQ ID NO: 540381 - RNA, 32 nt, Human
uugcucuuguuucccaggcuggagugcaaugg

SEQ ID NO: 540382 - RNA, 32 nt, Human
uugcucuuuccuucucuccaucauagucuggg

SEQ ID NO: 540383 - RNA, 32 nt, Human
uugcucuuuugcucccaaccaggaagccauca

SEQ ID NO: 540384 - RNA, 32 nt, Human
uugcucuuuuuccuccccuccuccuccucucc

SEQ ID NO: 540385 - RNA, 32 nt, Human
uugcugaaaauacaaaauuagccaggcguggu

SEQ ID NO: 540386 - RNA, 32 nt, Human
uugcugaaacuagauguuuuuacaugagaaau

SEQ ID NO: 540387 - RNA, 31 nt, Human
uugcugaagagagagacaaaagacugccaaa

SEQ ID NO: 540388 - RNA, 32 nt, Human
uugcugaauuccagaguccuuuuggaaaacug

SEQ ID NO: 540389 - RNA, 31 nt, Human
uugcugaauucgauaggauguugaaaugcug

SEQ ID NO: 540390 - RNA, 32 nt, Human
uugcugacagcaggugcauuccugcuucccuc

SEQ ID NO: 540391 - RNA, 32 nt, Human
uugcugacagcugccaagaaaaugcuucacuc

SEQ ID NO: 540392 - RNA, 32 nt, Human
uugcugacaggaggaggaaguaguggagauca

SEQ ID NO: 540393 - RNA, 32 nt, Human
uugcugacauggaggcaagucccacugcucuc

SEQ ID NO: 540394 - RNA, 32 nt, Human
uugcugaccacaggccuggccuggagaaaccc

SEQ ID NO: 540395 - RNA, 32 nt, Human
uugcugaccagccuggccggcuggcggagaaa

SEQ ID NO: 540396 - RNA, 32 nt, Human
uugcugaccgccgacugucaauggagcuggaa

SEQ ID NO: 540397 - RNA, 32 nt, Human
uugcugacguguuaaucuuuucaucugugagu

SEQ ID NO: 540398 - RNA, 32 nt, Human
uugcugacugacccuccaccucagagguaguu

SEQ ID NO: 540399 - RNA, 32 nt, Human
uugcugacuggcuucucccuuucuuacucaca

SEQ ID NO: 540400 - RNA, 32 nt, Human
uugcugagaaggcugugcuggcggcuaauggg

SEQ ID NO: 540401 - RNA, 20 nt, Human
uugcugagaauucuaugguc

SEQ ID NO: 540402 - RNA, 32 nt, Human
uugcugagagccaaacagagcccagggagacu

SEQ ID NO: 540403 - RNA, 15 nt, Human
uugcugagcaaggug

SEQ ID NO: 540404 - RNA, 32 nt, Human
uugcugaggaccaaggaggagaagagaccuuu

SEQ ID NO: 540405 - RNA, 21 nt, Human
uugcugaggcuggagugcagu

SEQ ID NO: 540406 - RNA, 32 nt, Human
uugcugaggcuggagugcagugaugugaucuu

SEQ ID NO: 540407 - RNA, 32 nt, Human
uugcugagggcagagggagacccagggcuacc

SEQ ID NO: 540408 - RNA, 32 nt, Human
uugcugagggccuaguuuccauggcuccgaag

SEQ ID NO: 540409 - RNA, 20 nt, Human
uugcugaggguuacuguauc

SEQ ID NO: 540410 - RNA, 32 nt, Human
uugcugaguacccagaguugcgaggaguuuuu

SEQ ID NO: 540411 - RNA, 32 nt, Human
uugcugagucaagaguguaaauaaaagaaaug

SEQ ID NO: 540412 - RNA, 32 nt, Human
uugcugagucccuggcacccagcaucagcccc

SEQ ID NO: 540413 - RNA, 18 nt, Human
uugcugagucucagccuu

SEQ ID NO: 540414 - RNA, 32 nt, Human
uugcugaguggaugacaaaaagaggggaauug

SEQ ID NO: 540415 - RNA, 32 nt, Human
uugcugaguuagcaguggugguaagcgugugu

SEQ ID NO: 540416 - RNA, 32 nt, Human
uugcugaucgccugggugguuguuggcguguc

SEQ ID NO: 540417 - RNA, 32 nt, Human
uugcugaugauggccuuaaagguggugaggga

SEQ ID NO: 540418 - RNA, 32 nt, Human
uugcugaugguauggcuguggucugggacuug

SEQ ID NO: 540419 - RNA, 32 nt, Human
uugcugauuagaacauagcucucuccaggaag

SEQ ID NO: 540420 - RNA, 32 nt, Human
uugcugcaaaaugacccagaggcaggggucag

SEQ ID NO: 540421 - RNA, 32 nt, Human
uugcugcaaucagugguccauuguuuccagug

SEQ ID NO: 540422 - RNA, 32 nt, Human
uugcugcaauuuucguggaauucauguugcuc

SEQ ID NO: 540423 - RNA, 32 nt, Human
uugcugcagacacccuugcuccugagucauua

SEQ ID NO: 540424 - RNA, 32 nt, Human
uugcugcagaggauccaguccagaucccagga

SEQ ID NO: 540425 - RNA, 32 nt, Human
uugcugcaggagguggguauuguguguguggg

SEQ ID NO: 540426 - RNA, 32 nt, Human
uugcugcaggcucuggggagucgccaugccua

SEQ ID NO: 540427 - RNA, 32 nt, Human
uugcugcagggaagaggagagcccccugcccu

SEQ ID NO: 540428 - RNA, 32 nt, Human
uugcugcaggggcagggcacucauggagaacc

SEQ ID NO: 540429 - RNA, 31 nt, Human
uugcugcaguuuccaccacucuuauacagga

SEQ ID NO: 540430 - RNA, 32 nt, Human
uugcugcauagaaggggcagguguugguuuuu

SEQ ID NO: 540431 - RNA, 32 nt, Human
uugcugcauucugccucucuaggaccaugguu

SEQ ID NO: 540432 - RNA, 20 nt, Human
uugcugcauugcccgggcua

SEQ ID NO: 540433 - RNA, 32 nt, Human
uugcugccaagugcgaauaaacggcgugauug

SEQ ID NO: 540434 - RNA, 32 nt, Human
uugcugccaauacagcugucauggcguccaag

SEQ ID NO: 540435 - RNA, 20 nt, Human
uugcugccacaccugagcca

SEQ ID NO: 540436 - RNA, 32 nt, Human
uugcugccaccaacauggagacuuuguaccgu

SEQ ID NO: 540437 - RNA, 32 nt, Human
uugcugccacgaggugguccaagccuucaggg

SEQ ID NO: 540438 - RNA, 32 nt, Human
uugcugccagcagggcccuuguuugggauuau

SEQ ID NO: 540439 - RNA, 32 nt, Human
uugcugccagccagggauguccagaggucggu

SEQ ID NO: 540440 - RNA, 23 nt, Human
uugcugccagggacccugagcca

SEQ ID NO: 540441 - RNA, 32 nt, Human
uugcugccauuggcaugaaauggccaacugug

SEQ ID NO: 540442 - RNA, 32 nt, Human
uugcugcccacauugugccuuuauuuuaugag

SEQ ID NO: 540443 - RNA, 22 nt, Human
uugcugcccaggcuagagugca

SEQ ID NO: 540444 - RNA, 24 nt, Human
uugcugcccaggcuagagugcaau

SEQ ID NO: 540445 - RNA, 32 nt, Human
uugcugcccaggcuagagugcaauggugcgau

SEQ ID NO: 540446 - RNA, 32 nt, Human
uugcugcccaggcucuagaucacauggcauca

SEQ ID NO: 540447 - RNA, 22 nt, Human
uugcugcccaggcuggagugca

SEQ ID NO: 540448 - RNA, 24 nt, Human
uugcugcccaggcuggagugcaau

SEQ ID NO: 540449 - RNA, 32 nt, Human
uugcugcccaggcuggagugcaauggugcaau

SEQ ID NO: 540450 - RNA, 24 nt, Human
uugcugcccaggcuggagugcagu

SEQ ID NO: 540451 - RNA, 32 nt, Human
uugcugcccaggcuggagugcaguggcucaau

SEQ ID NO: 540452 - RNA, 32 nt, Human
uugcugccccagcugcuggcgugcugucagca

SEQ ID NO: 540453 - RNA, 20 nt, Human
uugcugccccgccugggcca

SEQ ID NO: 540454 - RNA, 32 nt, Human
uugcugccccucuccccuaccuggcccauuca

SEQ ID NO: 540455 - RNA, 32 nt, Human
uugcugcccgucugcugaugugaccaguggca

SEQ ID NO: 540456 - RNA, 32 nt, Human
uugcugcccugccugucacguggcccugccua

SEQ ID NO: 540457 - RNA, 32 nt, Human
uugcugccgccgccaccgccccggcugccauc

SEQ ID NO: 540458 - RNA, 32 nt, Human
uugcugccuccuccuccuccaccugcucuccu

SEQ ID NO: 540459 - RNA, 32 nt, Human
uugcugccuccuccuccuccugcagcagcacc

SEQ ID NO: 540460 - RNA, 32 nt, Human
uugcugccucuaucuggucugccuugcccguu

SEQ ID NO: 540461 - RNA, 32 nt, Human
uugcugccucucaucaccucugccucaagaca

SEQ ID NO: 540462 - RNA, 32 nt, Human
uugcugccugagaggaaccagagcagacgcac

SEQ ID NO: 540463 - RNA, 32 nt, Human
uugcugccuggggccugcucucucccaggaau

SEQ ID NO: 540464 - RNA, 32 nt, Human
uugcugcgcacaccuguacucuccaaugaaca

SEQ ID NO: 540465 - RNA, 32 nt, Human
uugcugcgcuugcauccaugcccagccaauau

SEQ ID NO: 540466 - RNA, 32 nt, Human
uugcugcggaugcacagggaaagaucauguuu

SEQ ID NO: 540467 - RNA, 32 nt, Human
uugcugcggccucgaccuccugggcuuaagcg

SEQ ID NO: 540468 - RNA, 20 nt, Human
uugcugcuaauguccagcua

SEQ ID NO: 540469 - RNA, 32 nt, Human
uugcugcuauccuuguuauccuucccacuguu

SEQ ID NO: 540470 - RNA, 18 nt, Human
uugcugcucagcagacca

SEQ ID NO: 540471 - RNA, 32 nt, Human
uugcugcucaucuuggacagggaacacagguu

SEQ ID NO: 540472 - RNA, 19 nt, Human
uugcugcuccuuuggggca

SEQ ID NO: 540473 - RNA, 20 nt, Human
uugcugcucguuccccgggc

SEQ ID NO: 540474 - RNA, 32 nt, Human
uugcugcucucagagccagaaaaugcugacag

SEQ ID NO: 540475 - RNA, 32 nt, Human
uugcugcugaaagaugucugugugcccguauc

SEQ ID NO: 540476 - RNA, 32 nt, Human
uugcugcugaaagaugucugugugccuguauc

SEQ ID NO: 540477 - RNA, 32 nt, Human
uugcugcugaaggaggaggcagcagcgagguc

SEQ ID NO: 540478 - RNA, 32 nt, Human
uugcugcugagaacaucucugccuaauuuacc

SEQ ID NO: 540479 - RNA, 32 nt, Human
uugcugcugauagaggugaaaacgagauugau

SEQ ID NO: 540480 - RNA, 32 nt, Human
uugcugcugcaguauugaaacugugaagaacu

SEQ ID NO: 540481 - RNA, 20 nt, Human
uugcugcugccuccugggcu

SEQ ID NO: 540482 - RNA, 32 nt, Human
uugcugcugccugguguguccucagcucccag

SEQ ID NO: 540483 - RNA, 32 nt, Human
uugcugcugcgggaguccagagaggcaggagg

SEQ ID NO: 540484 - RNA, 32 nt, Human
uugcugcugcugcacccaacuacugagcugag

SEQ ID NO: 540485 - RNA, 19 nt, Human
uugcugcugcuucuccaga

SEQ ID NO: 540486 - RNA, 32 nt, Human
uugcugcuguuuggugacuggaagaggcacca

SEQ ID NO: 540487 - RNA, 32 nt, Human
uugcugcuucucuccagcuccugaacuuuucu

SEQ ID NO: 540488 - RNA, 21 nt, Human
uugcugcuucuguucuggguc

SEQ ID NO: 540489 - RNA, 19 nt, Human
uugcugcuugaaccgguca

SEQ ID NO: 540490 - RNA, 21 nt, Human
uugcugcuugcuugguccaca

SEQ ID NO: 540491 - RNA, 17 nt, Human
uugcugcuugucccagc

SEQ ID NO: 540492 - RNA, 32 nt, Human
uugcuggaacaacaacugacuucaugauuugc

SEQ ID NO: 540493 - RNA, 19 nt, Human
uugcuggaaccaccaagga

SEQ ID NO: 540494 - RNA, 32 nt, Human
uugcuggaacccaggagguggagguugcagug

SEQ ID NO: 540495 - RNA, 32 nt, Human
uugcuggaagaugaagugacugugcguguaag

SEQ ID NO: 540496 - RNA, 32 nt, Human
uugcuggaagcagccacaguuuggaaggggca

SEQ ID NO: 540497 - RNA, 32 nt, Human
uugcuggaauagggaucaagaggaauauaaaa

SEQ ID NO: 540498 - RNA, 32 nt, Human
uugcuggaaugaguuaagauuugggggacugu

SEQ ID NO: 540499 - RNA, 32 nt, Human
uugcuggacaacagacauaugccaccaauugu

SEQ ID NO: 540500 - RNA, 32 nt, Human
uugcuggacacaucucuuugcagguagcagca

SEQ ID NO: 540501 - RNA, 32 nt, Human
uugcuggagcccaggaggcacaggcugcagug

SEQ ID NO: 540502 - RNA, 32 nt, Human
uugcuggaggccaagcaagaaaagucaaugua

SEQ ID NO: 540503 - RNA, 32 nt, Human
uugcuggaucugcucccucucgcucucucacu

SEQ ID NO: 540504 - RNA, 32 nt, Human
uugcuggcaguggacauuauucuugcccuaag

SEQ ID NO: 540505 - RNA, 32 nt, Human
uugcuggcaguggagggcuugccaugaaaaug

SEQ ID NO: 540506 - RNA, 32 nt, Human
uugcuggcaucccggccaggugggcggggauu

SEQ ID NO: 540507 - RNA, 32 nt, Human
uugcuggccagcacuuguguagaaagaucgcu

SEQ ID NO: 540508 - RNA, 32 nt, Human
uugcuggccagcuugcccuucagcuaaugagu

SEQ ID NO: 540509 - RNA, 32 nt, Human
uugcuggccagggaguuggggacucagaggga

SEQ ID NO: 540510 - RNA, 32 nt, Human
uugcuggccauucuuggcuuuuagaagggaaa

SEQ ID NO: 540511 - RNA, 32 nt, Human
uugcuggccuggaagggaggagcgcccucuag

SEQ ID NO: 540512 - RNA, 32 nt, Human
uugcuggcuaauugacaguauuucucagcauc

SEQ ID NO: 540513 - RNA, 21 nt, Human
uugcuggcucguccccagcca

SEQ ID NO: 540514 - RNA, 32 nt, Human
uugcuggcugggccacgcgugcuugagaaggu

SEQ ID NO: 540515 - RNA, 23 nt, Human
uugcuggcugugaaaccaggaca

SEQ ID NO: 540516 - RNA, 32 nt, Human
uugcuggcuuaggacagagcaauacuuuacaa

SEQ ID NO: 540517 - RNA, 32 nt, Human
uugcuggcuucaggaguggagugagaauuucu

SEQ ID NO: 540518 - RNA, 24 nt, Human
uugcuggcuugugacucugggcca

SEQ ID NO: 540519 - RNA, 32 nt, Human
uugcugggaagagaggcgaagccaggucaccu

SEQ ID NO: 540520 - RNA, 32 nt, Human
uugcugggaauggaguugggaggcagguguug

SEQ ID NO: 540521 - RNA, 32 nt, Human
uugcugggaccuguuccacaaaugggcgucuu

SEQ ID NO: 540522 - RNA, 32 nt, Human
uugcugggacucggccggcucacaugcuauuc

SEQ ID NO: 540523 - RNA, 32 nt, Human
uugcugggaucauggcggagaaucacugcgag

SEQ ID NO: 540524 - RNA, 32 nt, Human
uugcugggaucauggcggggaaucacugcgag

SEQ ID NO: 540525 - RNA, 32 nt, Human
uugcugggauuuacaggcaugagccaccgcac

SEQ ID NO: 540526 - RNA, 24 nt, Human
uugcugggcacguggcagcauggg

SEQ ID NO: 540527 - RNA, 32 nt, Human
uugcugggcccagguguucaagguuauaguga

SEQ ID NO: 540528 - RNA, 32 nt, Human
uugcugggccuuggugugagagcaggcauauu

SEQ ID NO: 540529 - RNA, 17 nt, Human
uugcuggggaagggccc

SEQ ID NO: 540530 - RNA, 21 nt, Human
uugcuggggagguaaccguga

SEQ ID NO: 540531 - RNA, 32 nt, Human
uugcuggggccccuccugccuccacgcccacc

SEQ ID NO: 540532 - RNA, 32 nt, Human
uugcuggggccucuggacacaggcuggaccag

SEQ ID NO: 540533 - RNA, 32 nt, Human
uugcuggggguccuugagaaagcugcuucccc

SEQ ID NO: 540534 - RNA, 32 nt, Human
uugcuggguccucauguggcagagagagcaac

SEQ ID NO: 540535 - RNA, 32 nt, Human
uugcuggguggguaugggggagggggagacuc

SEQ ID NO: 540536 - RNA, 20 nt, Human
uugcuggguguauuauuuca

SEQ ID NO: 540537 - RNA, 23 nt, Human
uugcugguacaaagaccaaaaca

SEQ ID NO: 540538 - RNA, 20 nt, Human
uugcugguauucuagcucuu

SEQ ID NO: 540539 - RNA, 32 nt, Human
uugcuggucacugcaaccucugccuccugggu

SEQ ID NO: 540540 - RNA, 32 nt, Human
uugcugguccaagugcaauauguaauuauaaa

SEQ ID NO: 540541 - RNA, 32 nt, Human
uugcugguccuggcuauuuuugugucauuuau

SEQ ID NO: 540542 - RNA, 32 nt, Human
uugcuggucucaaacuccugaccucgggugau

SEQ ID NO: 540543 - RNA, 32 nt, Human
uugcuggucuggugucuuauuuccuaaaguga

SEQ ID NO: 540544 - RNA, 32 nt, Human
uugcuggugaacagccuguuugcuggaaugga

SEQ ID NO: 540545 - RNA, 32 nt, Human
uugcuggugggaaugugaaauggugcagccac

SEQ ID NO: 540546 - RNA, 32 nt, Human
uugcugguugagauggauucucgcucuguagc

SEQ ID NO: 540547 - RNA, 32 nt, Human
uugcuguacaacacuggcugugucucaaagcg

SEQ ID NO: 540548 - RNA, 32 nt, Human
uugcuguacagauccagagagccuuuuguccc

SEQ ID NO: 540549 - RNA, 32 nt, Human
uugcuguagcugggcggggagcagcucagcuc

SEQ ID NO: 540550 - RNA, 22 nt, Human
uugcugucaauguuuugaguca

SEQ ID NO: 540551 - RNA, 32 nt, Human
uugcugucauuuucugucucggcucccuccuc

SEQ ID NO: 540552 - RNA, 32 nt, Human
uugcuguccacucauaucagcuguguaguagc

SEQ ID NO: 540553 - RNA, 20 nt, Human
uugcuguccuuuuccaagga

SEQ ID NO: 540554 - RNA, 32 nt, Human
uugcugucuccccggcuggagcgcaguggcac

SEQ ID NO: 540555 - RNA, 32 nt, Human
uugcugucucugcucgcccuccuuucugugcc

SEQ ID NO: 540556 - RNA, 32 nt, Human
uugcugucugccuuugaaacuauauuuagaaa

SEQ ID NO: 540557 - RNA, 32 nt, Human
uugcugucuggcuuccucagacuuaaagcagc

SEQ ID NO: 540558 - RNA, 32 nt, Human
uugcugucugucuccaccccagccucuguucc

SEQ ID NO: 540559 - RNA, 32 nt, Human
uugcugucuuucuccuccagagggucuguguc

SEQ ID NO: 540560 - RNA, 32 nt, Human
uugcugugaacaaacuggacaggcuccgcggg

SEQ ID NO: 540561 - RNA, 32 nt, Human
uugcugugaacugcaguguuucauacgaacca

SEQ ID NO: 540562 - RNA, 23 nt, Human
uugcugugaucauaacugugauc

SEQ ID NO: 540563 - RNA, 32 nt, Human
uugcugugcacccagagauaguugggugacaa

SEQ ID NO: 540564 - RNA, 32 nt, Human
uugcugugcaggucgucaggaucugggcuucu

SEQ ID NO: 540565 - RNA, 32 nt, Human
uugcugugcccgugcagcuggcaccaacagaa

SEQ ID NO: 540566 - RNA, 32 nt, Human
uugcugugcccuguggccuggccgcagugagg

SEQ ID NO: 540567 - RNA, 32 nt, Human
uugcugugccuagucuagugucccccaaagca

SEQ ID NO: 540568 - RNA, 32 nt, Human
uugcugugccuccuauguaugucugguuugcu

SEQ ID NO: 540569 - RNA, 32 nt, Human
uugcugugcugaagcuuuguuuaaugaaaucc

SEQ ID NO: 540570 - RNA, 32 nt, Human
uugcuguggaagucaccaggccuccccuccug

SEQ ID NO: 540571 - RNA, 20 nt, Human
uugcugugggcacaccccag

SEQ ID NO: 540572 - RNA, 32 nt, Human
uugcuguggggguucagggagguggagauggg

SEQ ID NO: 540573 - RNA, 32 nt, Human
uugcugugucaccaggauggagugcaguggca

SEQ ID NO: 540574 - RNA, 32 nt, Human
uugcuguguccaacuccaguaccuggagcuuc

SEQ ID NO: 540575 - RNA, 32 nt, Human
uugcugugucugcaggcucacacgggaacucu

SEQ ID NO: 540576 - RNA, 32 nt, Human
uugcugugugcaucccagaggaggcacgucug

SEQ ID NO: 540577 - RNA, 22 nt, Human
uugcugugugcuagacuuucca

SEQ ID NO: 540578 - RNA, 32 nt, Human
uugcuguguggaagcagcgggggaagaccuag

SEQ ID NO: 540579 - RNA, 32 nt, Human
uugcuguguugcccaggaugguuucaaacucc

SEQ ID NO: 540580 - RNA, 21 nt, Human
uugcuguguugcucugagcua

SEQ ID NO: 540581 - RNA, 32 nt, Human
uugcuguuaccugguauuuccacucucacagu

SEQ ID NO: 540582 - RNA, 32 nt, Human
uugcuguuagaggcucuuucccagaaguugga

SEQ ID NO: 540583 - RNA, 32 nt, Human
uugcuguuagucuaaccuguaccauuuuguaa

SEQ ID NO: 540584 - RNA, 32 nt, Human
uugcuguucagugcuuuuuccuuuucaucugu

SEQ ID NO: 540585 - RNA, 32 nt, Human
uugcuguucccucagcucccagcuccaccucu

SEQ ID NO: 540586 - RNA, 32 nt, Human
uugcuguucuccaaggaaguucguuuccucug

SEQ ID NO: 540587 - RNA, 32 nt, Human
uugcuguucucucccuuucuucaugcccuguu

SEQ ID NO: 540588 - RNA, 32 nt, Human
uugcuguucugaguacugcucucaucacaccc

SEQ ID NO: 540589 - RNA, 32 nt, Human
uugcuguucugugugugccugcccugggggug

SEQ ID NO: 540590 - RNA, 32 nt, Human
uugcuguuggcugggcuacuguauacagugua

SEQ ID NO: 540591 - RNA, 32 nt, Human
uugcuguugggaggaagcagaggcagauggga

SEQ ID NO: 540592 - RNA, 32 nt, Human
uugcuguugggaggagucgggggcgagccuua

SEQ ID NO: 540593 - RNA, 32 nt, Human
uugcuguuuauaacagaaaacagacuuguaaa

SEQ ID NO: 540594 - RNA, 20 nt, Human
uugcuguuucuagugggcca

SEQ ID NO: 540595 - RNA, 32 nt, Human
uugcuguuucuccuugagaugcuuuuggagug

SEQ ID NO: 540596 - RNA, 18 nt, Human
uugcuguuucuguagcca

SEQ ID NO: 540597 - RNA, 32 nt, Human
uugcuguuucuucugcagucuuugcacugagg

SEQ ID NO: 540598 - RNA, 18 nt, Human
uugcuguuugaggagcca

SEQ ID NO: 540599 - RNA, 32 nt, Human
uugcuguuugcaauuuuuccaugaaguuugaa

SEQ ID NO: 540600 - RNA, 32 nt, Human
uugcuuaaauguuugcagucagugcaagacaa

SEQ ID NO: 540601 - RNA, 32 nt, Human
uugcuuaaccauuccucuaccucuugcauuuu

SEQ ID NO: 540602 - RNA, 32 nt, Human
uugcuuaagucugggagguugaggcugcagug

SEQ ID NO: 540603 - RNA, 32 nt, Human
uugcuuaauguccuccauuuacacuucucagc

SEQ ID NO: 540604 - RNA, 32 nt, Human
uugcuuacacccagagugcacacucacaggaa

SEQ ID NO: 540605 - RNA, 32 nt, Human
uugcuuacaccuguaaucccagcacuuuggga

SEQ ID NO: 540606 - RNA, 32 nt, Human
uugcuuacuuuuuaccaggagugcaguucauu

SEQ ID NO: 540607 - RNA, 32 nt, Human
uugcuuagaagccaucuaaucucagguuuaua

SEQ ID NO: 540608 - RNA, 32 nt, Human
uugcuuaggaggaggaaggggaaaguauacuu

SEQ ID NO: 540609 - RNA, 32 nt, Human
uugcuuaggccaccauugucugccucaucagg

SEQ ID NO: 540610 - RNA, 32 nt, Human
uugcuuaguugaagagaauaaagggaauaaga

SEQ ID NO: 540611 - RNA, 32 nt, Human
uugcuucaaagaugcccaacccccguaguagc

SEQ ID NO: 540612 - RNA, 32 nt, Human
uugcuucaacacagcaagcccaaugcacccag

SEQ ID NO: 540613 - RNA, 32 nt, Human
uugcuucacaguuaacagaaucuucacagaca

SEQ ID NO: 540614 - RNA, 32 nt, Human
uugcuucaccaggucugcucaggucagcgggg

SEQ ID NO: 540615 - RNA, 32 nt, Human
uugcuucacugcaauuuguuucugaucuccag

SEQ ID NO: 540616 - RNA, 32 nt, Human
uugcuucagcccuucccugagugcaguccccc

SEQ ID NO: 540617 - RNA, 32 nt, Human
uugcuucaggccgacuuccuaaggaaggcaug

SEQ ID NO: 540618 - RNA, 22 nt, Human
uugcuucagucuuugccuuugu

SEQ ID NO: 540619 - RNA, 32 nt, Human
uugcuucaucuucuggcuguuguggcacugac

SEQ ID NO: 540620 - RNA, 32 nt, Human
uugcuuccagaguucaagcuauucuccugucu

SEQ ID NO: 540621 - RNA, 32 nt, Human
uugcuucccacacaccucuccacgcucccagu

SEQ ID NO: 540622 - RNA, 21 nt, Human
uugcuucccacccauuccuca

SEQ ID NO: 540623 - RNA, 32 nt, Human
uugcuucccacccauuccucaucccucacucc

SEQ ID NO: 540624 - RNA, 32 nt, Human
uugcuucccaggagacugggcugggaacagga

SEQ ID NO: 540625 - RNA, 32 nt, Human
uugcuucccaggcuggagugcaguggugcgau

SEQ ID NO: 540626 - RNA, 32 nt, Human
uugcuucccgcagagugcagagacaggaagcu

SEQ ID NO: 540627 - RNA, 32 nt, Human
uugcuucccuaucuuggcuacugugaauaaug

SEQ ID NO: 540628 - RNA, 32 nt, Human
uugcuucccugagggcccccgcuggccaaggc

SEQ ID NO: 540629 - RNA, 32 nt, Human
uugcuucccuuucagcuuucuuccaucccugc

SEQ ID NO: 540630 - RNA, 32 nt, Human
uugcuucccuuuccagucacccuuggugcccu

SEQ ID NO: 540631 - RNA, 32 nt, Human
uugcuucccuuuccuuuguauuuucauuuuuc

SEQ ID NO: 540632 - RNA, 32 nt, Human
uugcuuccuaagaaaaugggugagugaaaaac

SEQ ID NO: 540633 - RNA, 32 nt, Human
uugcuuccuagcuuauuuauuucccaaacaac

SEQ ID NO: 540634 - RNA, 32 nt, Human
uugcuuccuaggauggauggcagauggcaaug

SEQ ID NO: 540635 - RNA, 32 nt, Human
uugcuuccucaccccugcucugaucuggaagg

SEQ ID NO: 540636 - RNA, 32 nt, Human
uugcuuccuccaccagucugaccucaguccuc

SEQ ID NO: 540637 - RNA, 32 nt, Human
uugcuuccuccaggacuugggacccuggagga

SEQ ID NO: 540638 - RNA, 32 nt, Human
uugcuuccucccugccuggccuagccagggcu

SEQ ID NO: 540639 - RNA, 32 nt, Human
uugcuuccugcucuccugugcggcgucugauu

SEQ ID NO: 540640 - RNA, 32 nt, Human
uugcuuccuggcucccugugcauuuuugucuu

SEQ ID NO: 540641 - RNA, 32 nt, Human
uugcuuccugugauacaacuugccaaaugcuu

SEQ ID NO: 540642 - RNA, 32 nt, Human
uugcuuccuuccuuccucucuuucuguuucuc

SEQ ID NO: 540643 - RNA, 32 nt, Human
uugcuucuacagcccguggacuuuagccuaaa

SEQ ID NO: 540644 - RNA, 21 nt, Human
uugcuucuaguccauccuucc

SEQ ID NO: 540645 - RNA, 32 nt, Human
uugcuucuaucgacagguaggugggugaaugg

SEQ ID NO: 540646 - RNA, 32 nt, Human
uugcuucuauggguaaggagugaggcacuuug

SEQ ID NO: 540647 - RNA, 24 nt, Human
uugcuucucaacaggugccuaccu

SEQ ID NO: 540648 - RNA, 32 nt, Human
uugcuucucaggggaggaagaaggaaugggca

SEQ ID NO: 540649 - RNA, 22 nt, Human
uugcuucucagugcucucuuuc

SEQ ID NO: 540650 - RNA, 32 nt, Human
uugcuucuccaaugcucaagugagucacaucu

SEQ ID NO: 540651 - RNA, 22 nt, Human
uugcuucucccuagugcuggua

SEQ ID NO: 540652 - RNA, 31 nt, Human
uugcuucuccucucugcuggcugagucugug

SEQ ID NO: 540653 - RNA, 21 nt, Human
uugcuucuccuucuccuuccu

SEQ ID NO: 540654 - RNA, 22 nt, Human
uugcuucucgcccaccucuucc

SEQ ID NO: 540655 - RNA, 21 nt, Human
uugcuucucucuccuucuuuc

SEQ ID NO: 540656 - RNA, 32 nt, Human
uugcuucucugaguaguuuccucugcugacau

SEQ ID NO: 540657 - RNA, 23 nt, Human
uugcuucugagaacagcagggug

SEQ ID NO: 540658 - RNA, 32 nt, Human
uugcuucugccuggcaucugugagcagcugcc

SEQ ID NO: 540659 - RNA, 22 nt, Human
uugcuucuggcugggugcggug

SEQ ID NO: 540660 - RNA, 24 nt, Human
uugcuucuggggaaauggcaggug

SEQ ID NO: 540661 - RNA, 32 nt, Human
uugcuucugguuucacacuuuuuaaccccucu

SEQ ID NO: 540662 - RNA, 32 nt, Human
uugcuucuguggcccaggcuggagugcagugg

SEQ ID NO: 540663 - RNA, 32 nt, Human
uugcuucuguucagucuccaucauggcaugcc

SEQ ID NO: 540664 - RNA, 32 nt, Human
uugcuucuguuguccacugauuaaucagccua

SEQ ID NO: 540665 - RNA, 22 nt, Human
uugcuucuuacccucccucccu

SEQ ID NO: 540666 - RNA, 32 nt, Human
uugcuucuuguucaaaggccucagccacccag

SEQ ID NO: 540667 - RNA, 32 nt, Human
uugcuucuuuuuccucuucccuucccacucuu

SEQ ID NO: 540668 - RNA, 32 nt, Human
uugcuugaaacccagaaggcagggguugcagu

SEQ ID NO: 540669 - RNA, 32 nt, Human
uugcuugaacagcuucuccugaguccuccuua

SEQ ID NO: 540670 - RNA, 32 nt, Human
uugcuugaacccaagaggcggagguuguggug

SEQ ID NO: 540671 - RNA, 32 nt, Human
uugcuugaacccaagaggucgaggcugcagug

SEQ ID NO: 540672 - RNA, 32 nt, Human
uugcuugaacccagaagguagagguugcagcc

SEQ ID NO: 540673 - RNA, 32 nt, Human
uugcuugaacccaggaagcggagguugcagug

SEQ ID NO: 540674 - RNA, 32 nt, Human
uugcuugaacccaggaagcggagguuguggug

SEQ ID NO: 540675 - RNA, 32 nt, Human
uugcuugaacccaggaaguggcaguugcagug

SEQ ID NO: 540676 - RNA, 32 nt, Human
uugcuugaacccaggagacauggguugcagug

SEQ ID NO: 540677 - RNA, 32 nt, Human
uugcuugaacccaggagacggagguugcagug

SEQ ID NO: 540678 - RNA, 32 nt, Human
uugcuugaacccaggagauagagguugcaaug

SEQ ID NO: 540679 - RNA, 32 nt, Human
uugcuugaacccaggagauggaaguugcagug

SEQ ID NO: 540680 - RNA, 32 nt, Human
uugcuugaacccaggagauggagguugcagug

SEQ ID NO: 540681 - RNA, 32 nt, Human
uugcuugaacccaggagauggagguugcggug

SEQ ID NO: 540682 - RNA, 32 nt, Human
uugcuugaacccaggaggaagagguugcagug

SEQ ID NO: 540683 - RNA, 32 nt, Human
uugcuugaacccaggaggcagaggguugcagu

SEQ ID NO: 540684 - RNA, 32 nt, Human
uugcuugaacccaggaggcagagguuacagua

SEQ ID NO: 540685 - RNA, 32 nt, Human
uugcuugaacccaggaggcagagguuacagug

SEQ ID NO: 540686 - RNA, 32 nt, Human
uugcuugaacccaggaggcagagguugcagug

SEQ ID NO: 540687 - RNA, 32 nt, Human
uugcuugaacccaggaggcagagguuguagug

SEQ ID NO: 540688 - RNA, 32 nt, Human
uugcuugaacccaggaggcgaagguugcagua

SEQ ID NO: 540689 - RNA, 32 nt, Human
uugcuugaacccaggaggcggagauugcagug

SEQ ID NO: 540690 - RNA, 32 nt, Human
uugcuugaacccaggaggcggaggcagaggcu

SEQ ID NO: 540691 - RNA, 32 nt, Human
uugcuugaacccaggaggcggagguagcagug

SEQ ID NO: 540692 - RNA, 32 nt, Human
uugcuugaacccaggaggcggagguaguggug

SEQ ID NO: 540693 - RNA, 32 nt, Human
uugcuugaacccaggaggcggagguugcacug

SEQ ID NO: 540694 - RNA, 32 nt, Human
uugcuugaacccaggaggcggagguugcagug

SEQ ID NO: 540695 - RNA, 32 nt, Human
uugcuugaacccaggaggcggagguugccgug

SEQ ID NO: 540696 - RNA, 32 nt, Human
uugcuugaacccaggaggcggagguugcggug

SEQ ID NO: 540697 - RNA, 32 nt, Human
uugcuugaacccaggaggcggagguuguagug

SEQ ID NO: 540698 - RNA, 32 nt, Human
uugcuugaacccaggaggcggaguuugcagug

SEQ ID NO: 540699 - RNA, 32 nt, Human
uugcuugaacccaggaggcggggguugcagug

SEQ ID NO: 540700 - RNA, 32 nt, Human
uugcuugaacccaggaggcugagguugcagug

SEQ ID NO: 540701 - RNA, 32 nt, Human
uugcuugaacccaggagguagaaguugcagug

SEQ ID NO: 540702 - RNA, 32 nt, Human
uugcuugaacccaggagguggagguugcagua

SEQ ID NO: 540703 - RNA, 32 nt, Human
uugcuugaacccaggagguggagguugcagug

SEQ ID NO: 540704 - RNA, 32 nt, Human
uugcuugaacccaggagguggagguuguggug

SEQ ID NO: 540705 - RNA, 32 nt, Human
uugcuugaacccaggagguggaguuugcagug

SEQ ID NO: 540706 - RNA, 32 nt, Human
uugcuugaacccaggcaguggagguugcagug

SEQ ID NO: 540707 - RNA, 32 nt, Human
uugcuugaacccagggggcagagguugcagug

SEQ ID NO: 540708 - RNA, 32 nt, Human
uugcuugaacccaugaggcggagguugcagug

SEQ ID NO: 540709 - RNA, 32 nt, Human
uugcuugaacccaugagguggagguugcggug

SEQ ID NO: 540710 - RNA, 32 nt, Human
uugcuugaauccaggaggcagagguugcaaug

SEQ ID NO: 540711 - RNA, 32 nt, Human
uugcuugaauccaggaggcagagguugcagug

SEQ ID NO: 540712 - RNA, 32 nt, Human
uugcuugaauccaggaggcggagguugcagug

SEQ ID NO: 540713 - RNA, 32 nt, Human
uugcuugaauccaggagguggagguugcagcg

SEQ ID NO: 540714 - RNA, 32 nt, Human
uugcuugaccccaggagguggacauugcagug

SEQ ID NO: 540715 - RNA, 32 nt, Human
uugcuugacuucacuccagggugagacuugac

SEQ ID NO: 540716 - RNA, 32 nt, Human
uugcuugacuuuuuauaugauauugugcaaau

SEQ ID NO: 540717 - RNA, 32 nt, Human
uugcuugagaggcaguguggcuucugugacug

SEQ ID NO: 540718 - RNA, 32 nt, Human
uugcuugagcccaagagguugaggcugcagug

SEQ ID NO: 540719 - RNA, 32 nt, Human
uugcuugagcccagaaguugaagaccagccug

SEQ ID NO: 540720 - RNA, 32 nt, Human
uugcuugagcccaggagagugaggcuaggcau

SEQ ID NO: 540721 - RNA, 32 nt, Human
uugcuugagcccaggaggcagagguugcagua

SEQ ID NO: 540722 - RNA, 32 nt, Human
uugcuugagcccaggaggcagagguugcagug

SEQ ID NO: 540723 - RNA, 32 nt, Human
uugcuugagcccaggaggucaaggcugcagug

SEQ ID NO: 540724 - RNA, 32 nt, Human
uugcuugagcccaggaggucgaggcugcagug

SEQ ID NO: 540725 - RNA, 32 nt, Human
uugcuugagcccaggagguugaggcugcagug

SEQ ID NO: 540726 - RNA, 32 nt, Human
uugcuugagcccaggaguucaagaccagccug

SEQ ID NO: 540727 - RNA, 32 nt, Human
uugcuugagcccaggaguucaagagcagccug

SEQ ID NO: 540728 - RNA, 32 nt, Human
uugcuugagcccaggaguuggagaccagucug

SEQ ID NO: 540729 - RNA, 32 nt, Human
uugcuugagcccaggaguuuaagguuguagug

SEQ ID NO: 540730 - RNA, 32 nt, Human
uugcuugagcccaggaguuugagccuucagug

SEQ ID NO: 540731 - RNA, 32 nt, Human
uugcuugagcccaggaguuugagggcagccug

SEQ ID NO: 540732 - RNA, 32 nt, Human
uugcuugagcccaggaguuugagguugcagug

SEQ ID NO: 540733 - RNA, 32 nt, Human
uugcuugagcccaggaguuugagguuguaggg

SEQ ID NO: 540734 - RNA, 32 nt, Human
uugcuugagcccaggaguuugaguccagccug

SEQ ID NO: 540735 - RNA, 32 nt, Human
uugcuugagcccagggguuugagaccagcuug

SEQ ID NO: 540736 - RNA, 32 nt, Human
uugcuugagcucaggaauuugaugauguagua

SEQ ID NO: 540737 - RNA, 32 nt, Human
uugcuugaggccagagguucaagaccagccug

SEQ ID NO: 540738 - RNA, 32 nt, Human
uugcuugaguccaggagguugaggcugcaguc

SEQ ID NO: 540739 - RNA, 32 nt, Human
uugcuugaguccaugguugaugcugcugagaa

SEQ ID NO: 540740 - RNA, 32 nt, Human
uugcuugaugugugugcaauguacauacuuga

SEQ ID NO: 540741 - RNA, 32 nt, Human
uugcuugauugagcuuauuacucucuauuuug

SEQ ID NO: 540742 - RNA, 32 nt, Human
uugcuugcaaggaagcagugcguuauaucaau

SEQ ID NO: 540743 - RNA, 32 nt, Human
uugcuugcacacaccagcagagcuaagacugg

SEQ ID NO: 540744 - RNA, 32 nt, Human
uugcuugcacuccagccugggugacagaguga

SEQ ID NO: 540745 - RNA, 32 nt, Human
uugcuugcacuuccccuauugacacaugaaag

SEQ ID NO: 540746 - RNA, 31 nt, Human
uugcuugcacuuuuccacaucagaccuucca

SEQ ID NO: 540747 - RNA, 32 nt, Human
uugcuugccugugacaucucuguggcaggggu

SEQ ID NO: 540748 - RNA, 32 nt, Human
uugcuugcuauggagaaagauucugaacuuuc

SEQ ID NO: 540749 - RNA, 32 nt, Human
uugcuugcugaccuuuuucaaaacgaacugac

SEQ ID NO: 540750 - RNA, 32 nt, Human
uugcuugcugugugaauugacaagcacuuuua

SEQ ID NO: 540751 - RNA, 32 nt, Human
uugcuuggaccuaggagguggagguugcagug

SEQ ID NO: 540752 - RNA, 32 nt, Human
uugcuuggagcagcauuucauguucuuuugcu

SEQ ID NO: 540753 - RNA, 32 nt, Human
uugcuugggcacugucugugugcaggucaggc

SEQ ID NO: 540754 - RNA, 32 nt, Human
uugcuugggcccaggagauggagguugcggug

SEQ ID NO: 540755 - RNA, 32 nt, Human
uugcuuggguaacccagugcuugcuugcuuuc

SEQ ID NO: 540756 - RNA, 32 nt, Human
uugcuuggguuggacaauacaggaauugcuuc

SEQ ID NO: 540757 - RNA, 32 nt, Human
uugcuugguuauuccccucuugcucuucuuua

SEQ ID NO: 540758 - RNA, 32 nt, Human
uugcuuguacuguauguuucucuacuguaugg

SEQ ID NO: 540759 - RNA, 32 nt, Human
uugcuuguauacacaacagcuguuuugcuuuu

SEQ ID NO: 540760 - RNA, 32 nt, Human
uugcuuguauagccuuuugacccuucuugagu

SEQ ID NO: 540761 - RNA, 32 nt, Human
uugcuugucaaugucuuaaaacuacccuucac

SEQ ID NO: 540762 - RNA, 32 nt, Human
uugcuugucacccaggcuggagugcaauggca

SEQ ID NO: 540763 - RNA, 19 nt, Human
uugcuugugcccugggcca

SEQ ID NO: 540764 - RNA, 32 nt, Human
uugcuugugcucuccagaacccaacugccuca

SEQ ID NO: 540765 - RNA, 32 nt, Human
uugcuuguggagaagcgaagggcugaggggag

SEQ ID NO: 540766 - RNA, 20 nt, Human
uugcuuguuugucucaguua

SEQ ID NO: 540767 - RNA, 25 nt, Human
uugcuuuaaaagaagcaaugcagua

SEQ ID NO: 540768 - RNA, 32 nt, Human
uugcuuuaaagcucugucccuuacccacugac

SEQ ID NO: 540769 - RNA, 32 nt, Human
uugcuuuaauagaauaaugagagcaaguuugu

SEQ ID NO: 540770 - RNA, 32 nt, Human
uugcuuuacauacuagacauuuuucuucucuu

SEQ ID NO: 540771 - RNA, 32 nt, Human
uugcuuuaccugugcuggcuuccagagaugga

SEQ ID NO: 540772 - RNA, 32 nt, Human
uugcuuuacgaaacugcacuccugucuucugg

SEQ ID NO: 540773 - RNA, 22 nt, Human
uugcuuuacuuuucaccuugca

SEQ ID NO: 540774 - RNA, 32 nt, Human
uugcuuuagaacuaccaucuucauauacagga

SEQ ID NO: 540775 - RNA, 32 nt, Human
uugcuuuagaacuuauguggcaugacauagcu

SEQ ID NO: 540776 - RNA, 32 nt, Human
uugcuuuagccaaaggagagugcauggaggac

SEQ ID NO: 540777 - RNA, 32 nt, Human
uugcuuuaggcagagucagucacuuuucuucu

SEQ ID NO: 540778 - RNA, 32 nt, Human
uugcuuuaggcaggccccagagcucccugccu

SEQ ID NO: 540779 - RNA, 21 nt, Human
uugcuuuagucuuucauugca

SEQ ID NO: 540780 - RNA, 27 nt, Human
uugcuuuaguuuuuucaucuguuuugu

SEQ ID NO: 540781 - RNA, 32 nt, Human
uugcuuuauaagugaggguagggugagggagg

SEQ ID NO: 540782 - RNA, 32 nt, Human
uugcuuucaagcaaaaugccugggcuuggggg

SEQ ID NO: 540783 - RNA, 32 nt, Human
uugcuuucagaaguugacauuucuauucauug

SEQ ID NO: 540784 - RNA, 32 nt, Human
uugcuuucauacuacagcagcaauguugaaga

SEQ ID NO: 540785 - RNA, 32 nt, Human
uugcuuucaucacagccugaaaauucacugga

SEQ ID NO: 540786 - RNA, 32 nt, Human
uugcuuucauuuaguugagaaaagccagcaua

SEQ ID NO: 540787 - RNA, 32 nt, Human
uugcuuucauuugaauauuaaaagugaauuuu

SEQ ID NO: 540788 - RNA, 32 nt, Human
uugcuuuccagaaauacuaucuauauuaauuu

SEQ ID NO: 540789 - RNA, 32 nt, Human
uugcuuuccaggguaucuaugugugugcaugu

SEQ ID NO: 540790 - RNA, 32 nt, Human
uugcuuuccccuuccuccucccucucucccuu

SEQ ID NO: 540791 - RNA, 24 nt, Human
uugcuuuccugagaagaugcggug

SEQ ID NO: 540792 - RNA, 32 nt, Human
uugcuuuccuuaacugaauuucaucaaauuca

SEQ ID NO: 540793 - RNA, 32 nt, Human
uugcuuucgccuguaaucccaacacuuuggga

SEQ ID NO: 540794 - RNA, 21 nt, Human
uugcuuucuccguuucuuccu

SEQ ID NO: 540795 - RNA, 32 nt, Human
uugcuuucucucccucuccugcgugucucuga

SEQ ID NO: 540796 - RNA, 32 nt, Human
uugcuuucucucucaugccuccugaggcuguu

SEQ ID NO: 540797 - RNA, 32 nt, Human
uugcuuucuggacuuuuuccaucuagagccug

SEQ ID NO: 540798 - RNA, 32 nt, Human
uugcuuucugugucuugguuucugccugcugc

SEQ ID NO: 540799 - RNA, 32 nt, Human
uugcuuucuucccuuguucaacaucagagaau

SEQ ID NO: 540800 - RNA, 32 nt, Human
uugcuuucuugucuuuucagaagcaagccaga

SEQ ID NO: 540801 - RNA, 32 nt, Human
uugcuuugaacccgggaggcagagguugugag

SEQ ID NO: 540802 - RNA, 32 nt, Human
uugcuuugagcagaguuggagugccuucaucc

SEQ ID NO: 540803 - RNA, 32 nt, Human
uugcuuugauucaggccagcugguuuuuccug

SEQ ID NO: 540804 - RNA, 24 nt, Human
uugcuuuggcagucucucuucccc

SEQ ID NO: 540805 - RNA, 32 nt, Human
uugcuuuggcuucaucucuuuucugucagucu

SEQ ID NO: 540806 - RNA, 32 nt, Human
uugcuuugucaaucucugccccggucugaugu

SEQ ID NO: 540807 - RNA, 32 nt, Human
uugcuuuguguauacugaauuuuugcagcaaa

SEQ ID NO: 540808 - RNA, 32 nt, Human
uugcuuuguugccaggcuggagugcaguggcg

SEQ ID NO: 540809 - RNA, 32 nt, Human
uugcuuuuauuuccuccuccuucaccuccaac

SEQ ID NO: 540810 - RNA, 32 nt, Human
uugcuuuucacaucucuccuccuacagccuua

SEQ ID NO: 540811 - RNA, 32 nt, Human
uugcuuuucacgcccagggcucaguggcccag

SEQ ID NO: 540812 - RNA, 32 nt, Human
uugcuuuuccaguuaauguggccaugugauuc

SEQ ID NO: 540813 - RNA, 32 nt, Human
uugcuuuuccccucacuguuccugaaugcucu

SEQ ID NO: 540814 - RNA, 32 nt, Human
uugcuuuucuccccauaucccaaggcgaacgg

SEQ ID NO: 540815 - RNA, 32 nt, Human
uugcuuuucuuccucucucauuuggguuugag

SEQ ID NO: 540816 - RNA, 32 nt, Human
uugcuuuucuuuccucaucuucacugcccccu

SEQ ID NO: 540817 - RNA, 32 nt, Human
uugcuuuugaacacuuacuuaguucuuagcua

SEQ ID NO: 540818 - RNA, 24 nt, Human
uugcuuuugacuuuucaaugggug

SEQ ID NO: 540819 - RNA, 32 nt, Human
uugcuuuugcaucuucuguuccuggguaaugg

SEQ ID NO: 540820 - RNA, 32 nt, Human
uugcuuuugccucugcccaaccagguugcagu

SEQ ID NO: 540821 - RNA, 32 nt, Human
uugcuuuugggagacuggaaaagggaagguga

SEQ ID NO: 540822 - RNA, 22 nt, Human
uugcuuuugggagccagcggua

SEQ ID NO: 540823 - RNA, 32 nt, Human
uugcuuuuguguuauaaugaugcagcugcugc

SEQ ID NO: 540824 - RNA, 32 nt, Human
uugcuuuuucauuuucuuagcagugucucuca

SEQ ID NO: 540825 - RNA, 32 nt, Human
uugcuuuuugagacagagucucacucuguugc

SEQ ID NO: 540826 - RNA, 32 nt, Human
uuggaaaaacaaaaucugcaagcuuugaauga

SEQ ID NO: 540827 - RNA, 24 nt, Human
uuggaaaaaccuggugguguuuac

SEQ ID NO: 540828 - RNA, 32 nt, Human
uuggaaaaacuggccccauauuuuguguacac

SEQ ID NO: 540829 - RNA, 32 nt, Human
uuggaaaacagcccguuuacuuggcaagacug

SEQ ID NO: 540830 - RNA, 32 nt, Human
uuggaaaaccaaaaacaacuaacaagaaacca

SEQ ID NO: 540831 - RNA, 32 nt, Human
uuggaaaaccuuuugaacccucaaguuaccau

SEQ ID NO: 540832 - RNA, 32 nt, Human
uuggaaaacuaauguacagauuccacaacuca

SEQ ID NO: 540833 - RNA, 25 nt, Human
uuggaaaagacaguggagaugaggu

SEQ ID NO: 540834 - RNA, 32 nt, Human
uuggaaaagagacucauuugcugaugguucau

SEQ ID NO: 540835 - RNA, 32 nt, Human
uuggaaaagccagcuuacugccacucucuucc

SEQ ID NO: 540836 - RNA, 32 nt, Human
uuggaaaaguaauaggcgaaguagcuguaaag

SEQ ID NO: 540837 - RNA, 32 nt, Human
uuggaaaauacaacacaaaaagccaucuagcc

SEQ ID NO: 540838 - RNA, 32 nt, Human
uuggaaacagacaaguagaagaugcuacagaa

SEQ ID NO: 540839 - RNA, 32 nt, Human
uuggaaacguggugaugugcuguucguuuaua

SEQ ID NO: 540840 - RNA, 32 nt, Human
uuggaaacucuggggugaggccagccuucuag

SEQ ID NO: 540841 - RNA, 32 nt, Human
uuggaaacuugucugagacugacuuuaucaau

SEQ ID NO: 540842 - RNA, 32 nt, Human
uuggaaagaaaccagggggccaggggaacagg

SEQ ID NO: 540843 - RNA, 32 nt, Human
uuggaaagauagagcauucugucugggcagag

SEQ ID NO: 540844 - RNA, 32 nt, Human
uuggaaagcagccuggccaacauagugggacc

SEQ ID NO: 540845 - RNA, 32 nt, Human
uuggaaaggaaagcagcugagauccagaggag

SEQ ID NO: 540846 - RNA, 32 nt, Human
uuggaaaggagagucagguauuagaggaaaga

SEQ ID NO: 540847 - RNA, 32 nt, Human
uuggaaaggauuuaccguucugcaacaacgga

SEQ ID NO: 540848 - RNA, 32 nt, Human
uuggaaaggcagcagcaggacaaggaucagug

SEQ ID NO: 540849 - RNA, 32 nt, Human
uuggaaaggcugaguaggaauggugccuggca

SEQ ID NO: 540850 - RNA, 32 nt, Human
uuggaaaguucugcaauaagauucuaguucuc

SEQ ID NO: 540851 - RNA, 32 nt, Human
uuggaaaguuugcccgagggcuggugcaggcu

SEQ ID NO: 540852 - RNA, 32 nt, Human
uuggaaaguuuugaagucaggaaaagacguuu

SEQ ID NO: 540853 - RNA, 32 nt, Human
uuggaaauaaaaggugauucccuugguaaaaa

SEQ ID NO: 540854 - RNA, 32 nt, Human
uuggaaaucaaauuagaucauugacagaaaaa

SEQ ID NO: 540855 - RNA, 32 nt, Human
uuggaaaucagcuucuggaggaaugcauguca

SEQ ID NO: 540856 - RNA, 32 nt, Human
uuggaaaucagucauuacaguaaccgaaacca

SEQ ID NO: 540857 - RNA, 32 nt, Human
uuggaaaucugaagacuuucguuuacagcugu

SEQ ID NO: 540858 - RNA, 32 nt, Human
uuggaaaucuguggcccuggaggaggaacagg

SEQ ID NO: 540859 - RNA, 23 nt, Human
uuggaaaucugugugugugcggg

SEQ ID NO: 540860 - RNA, 32 nt, Human
uuggaaaugacagauugugaauuccaaggccc

SEQ ID NO: 540861 - RNA, 32 nt, Human
uuggaaaugacuagagaggcagaggagaaggg

SEQ ID NO: 540862 - RNA, 32 nt, Human
uuggaaaugacuuucagccucugccucagucu

SEQ ID NO: 540863 - RNA, 32 nt, Human
uuggaaaugggacaggucuuucagacucacag

SEQ ID NO: 540864 - RNA, 32 nt, Human
uuggaaauguaacuugaagcagcugcuuuaag

SEQ ID NO: 540865 - RNA, 31 nt, Human
uuggaacaaguguucagagcagacagaagca

SEQ ID NO: 540866 - RNA, 32 nt, Human
uuggaacacaacuuuuaucugugcacaauuuu

SEQ ID NO: 540867 - RNA, 32 nt, Human
uuggaacagaagaugauggccacuccgaacca

SEQ ID NO: 540868 - RNA, 32 nt, Human
uuggaacagaagcugggauagaugggcagcag

SEQ ID NO: 540869 - RNA, 32 nt, Human
uuggaacagugacaauaaaugagaccccuuua

SEQ ID NO: 540870 - RNA, 32 nt, Human
uuggaaccacuauuuucucaucacgacagcaa

SEQ ID NO: 540871 - RNA, 32 nt, Human
uuggaaccagggggaaccaggaaggggcuccu

SEQ ID NO: 540872 - RNA, 23 nt, Human
uuggaaccauuuguguucaguua

SEQ ID NO: 540873 - RNA, 32 nt, Human
uuggaaccccuccagggggaaccaaacauugu

SEQ ID NO: 540874 - RNA, 32 nt, Human
uuggaaccccuguuugaugagacauuugaauu

SEQ ID NO: 540875 - RNA, 32 nt, Human
uuggaaccccuuuguuauucaugaggauuaca

SEQ ID NO: 540876 - RNA, 32 nt, Human
uuggaacccugggcgucgagacaggaaggcag

SEQ ID NO: 540877 - RNA, 32 nt, Human
uuggaacccuuuagcuuuguuuuggaauggcc

SEQ ID NO: 540878 - RNA, 32 nt, Human
uuggaaccugcgccgugugcucugggggcugu

SEQ ID NO: 540879 - RNA, 32 nt, Human
uuggaaccugcucuccugcuugcuggucccug

SEQ ID NO: 540880 - RNA, 32 nt, Human
uuggaaccugggaggcagcaucugggggcagu

SEQ ID NO: 540881 - RNA, 32 nt, Human
uuggaacgguuguuguaaauaggccacauccu

SEQ ID NO: 540882 - RNA, 32 nt, Human
uuggaacgugcaccuggugaaacugcauugau

SEQ ID NO: 540883 - RNA, 32 nt, Human
uuggaacucugcagagaguccccagcaggaag

SEQ ID NO: 540884 - RNA, 32 nt, Human
uuggaacugccucuuauuuuaggcuguagaua

SEQ ID NO: 540885 - RNA, 32 nt, Human
uuggaacugcucagcuagcaggugcccccauc

SEQ ID NO: 540886 - RNA, 32 nt, Human
uuggaacuuacuaauuugggcuuuucaaaaac

SEQ ID NO: 540887 - RNA, 32 nt, Human
uuggaacuucuuuuuaaagucaucucaugguc

SEQ ID NO: 540888 - RNA, 32 nt, Human
uuggaacuugccugccuuuccauccauggcca

SEQ ID NO: 540889 - RNA, 32 nt, Human
uuggaagaaaaagaaaccacagaguccagccc

SEQ ID NO: 540890 - RNA, 32 nt, Human
uuggaagaaaucugguuugagacucugaaccu

SEQ ID NO: 540891 - RNA, 32 nt, Human
uuggaagaaauggcucauuugggaaacuacga

SEQ ID NO: 540892 - RNA, 32 nt, Human
uuggaagaaauguugaugccagaggggugagg

SEQ ID NO: 540893 - RNA, 32 nt, Human
uuggaagacauggauuuccuggaagacgugga

SEQ ID NO: 540894 - RNA, 19 nt, Human
uuggaagaccagggugggu

SEQ ID NO: 540895 - RNA, 32 nt, Human
uuggaagacccguguuuccuggaccgcgaauc

SEQ ID NO: 540896 - RNA, 32 nt, Human
uuggaagaccgaggcggguggaucacuugaag

SEQ ID NO: 540897 - RNA, 32 nt, Human
uuggaagagaaaaggauauggaacauacucuc

SEQ ID NO: 540898 - RNA, 32 nt, Human
uuggaagagaugaaagaucuucauggcuguuu

SEQ ID NO: 540899 - RNA, 30 nt, Human
uuggaagagcaucacagggcauaguuucac

SEQ ID NO: 540900 - RNA, 32 nt, Human
uuggaagaggaaaaugaugagacaucuaggag

SEQ ID NO: 540901 - RNA, 32 nt, Human
uuggaagaggaacauccagucacucaagugcu

SEQ ID NO: 540902 - RNA, 32 nt, Human
uuggaagaggaggaggaggaggagaaggagga

SEQ ID NO: 540903 - RNA, 21 nt, Human
uuggaagaggucugggugggg

SEQ ID NO: 540904 - RNA, 32 nt, Human
uuggaagaguagcugugguuguaaagcaguac

SEQ ID NO: 540905 - RNA, 31 nt, Human
uuggaagcaaaugacaucacagcaggucaga

SEQ ID NO: 540906 - RNA, 31 nt, Human
uuggaagcacuuuuucugcauacuuagauga

SEQ ID NO: 540907 - RNA, 22 nt, Human
uuggaagcagcugcugcugcug

SEQ ID NO: 540908 - RNA, 32 nt, Human
uuggaagcaggcugguagaguccuguaaauga

SEQ ID NO: 540909 - RNA, 32 nt, Human
uuggaagccagccugcugucgcucugugggga

SEQ ID NO: 540910 - RNA, 23 nt, Human
uuggaagcccuagacugcugcug

SEQ ID NO: 540911 - RNA, 32 nt, Human
uuggaagccgccagccccagaagaugccugcc

SEQ ID NO: 540912 - RNA, 32 nt, Human
uuggaagccuucucccugucauucucaacgcu

SEQ ID NO: 540913 - RNA, 32 nt, Human
uuggaagcuacacucaaagacacucccaccag

SEQ ID NO: 540914 - RNA, 32 nt, Human
uuggaagcuagcuccccuccucuccccuccac

SEQ ID NO: 540915 - RNA, 27 nt, Human
uuggaagcugaacugcuuuuguugcug

SEQ ID NO: 540916 - RNA, 21 nt, Human
uuggaagcugagauuacucug

SEQ ID NO: 540917 - RNA, 32 nt, Human
uuggaagcugggcuccuuaaaggaggccucua

SEQ ID NO: 540918 - RNA, 22 nt, Human
uuggaagcuggugcugcugcug

SEQ ID NO: 540919 - RNA, 32 nt, Human
uuggaaggaagcagaagcagagcugugguuuu

SEQ ID NO: 540920 - RNA, 32 nt, Human
uuggaaggagaagggagggaagagagcagaag

SEQ ID NO: 540921 - RNA, 32 nt, Human
uuggaaggaucagaucaaagagaaagcugggu

SEQ ID NO: 540922 - RNA, 32 nt, Human
uuggaaggccaagguagaagaaucacuugagc

SEQ ID NO: 540923 - RNA, 32 nt, Human
uuggaaggcccaaacccucucccuugaguggc

SEQ ID NO: 540924 - RNA, 32 nt, Human
uuggaaggcccagcuggcucagcacaaauccu

SEQ ID NO: 540925 - RNA, 32 nt, Human
uuggaaggccgaggcaggcggaucaccugagg

SEQ ID NO: 540926 - RNA, 32 nt, Human
uuggaaggccgaggcaggcggaucacgagguc

SEQ ID NO: 540927 - RNA, 32 nt, Human
uuggaaggccgaggcagguggaucaccugagg

SEQ ID NO: 540928 - RNA, 32 nt, Human
uuggaaggccgaggcagguggaucacuugaga

SEQ ID NO: 540929 - RNA, 32 nt, Human
uuggaaggccgaggcgggcagaucacuagagg

SEQ ID NO: 540930 - RNA, 32 nt, Human
uuggaaggccgaggcgggcggaucauuugagc

SEQ ID NO: 540931 - RNA, 32 nt, Human
uuggaaggccgaggcgggugggucaccugagg

SEQ ID NO: 540932 - RNA, 32 nt, Human
uuggaaggccgaggugggcagaucaucugagg

SEQ ID NO: 540933 - RNA, 32 nt, Human
uuggaaggccgagguggguggaucaccugagg

SEQ ID NO: 540934 - RNA, 22 nt, Human
uuggaaggccuccgucccaguc

SEQ ID NO: 540935 - RNA, 32 nt, Human
uuggaaggcugagacaggagaaucgcuugaac

SEQ ID NO: 540936 - RNA, 32 nt, Human
uuggaaggcugaggaggguggaucacgagguc

SEQ ID NO: 540937 - RNA, 32 nt, Human
uuggaaggcugaggcaggagaaucacuugaac

SEQ ID NO: 540938 - RNA, 32 nt, Human
uuggaaggcugaggcaggagaaucaucugaac

SEQ ID NO: 540939 - RNA, 32 nt, Human
uuggaaggcugaggcaggagaaucccuugaac

SEQ ID NO: 540940 - RNA, 32 nt, Human
uuggaaggcugaggcaggagaaucgcuugaac

SEQ ID NO: 540941 - RNA, 32 nt, Human
uuggaaggcugaggcaggagaauugcuugaac

SEQ ID NO: 540942 - RNA, 32 nt, Human
uuggaaggcugaggcaggaggaucacuuuagg

SEQ ID NO: 540943 - RNA, 32 nt, Human
uuggaaggcugaggcaggcagaucacuugagg

SEQ ID NO: 540944 - RNA, 32 nt, Human
uuggaaggcugaggcggguggaucacaagguc

SEQ ID NO: 540945 - RNA, 32 nt, Human
uuggaaggcuguagaucagagguucuaguucc

SEQ ID NO: 540946 - RNA, 32 nt, Human
uuggaagggaagggaggugggcagcagugggu

SEQ ID NO: 540947 - RNA, 32 nt, Human
uuggaagggacuggaggaaucauauucaauga

SEQ ID NO: 540948 - RNA, 32 nt, Human
uuggaagggagcaggaggaaggacugauacug

SEQ ID NO: 540949 - RNA, 32 nt, Human
uuggaagggcaucaugaccucuuggccucucc

SEQ ID NO: 540950 - RNA, 32 nt, Human
uuggaagggcugguggacugugcccuucuuuc

SEQ ID NO: 540951 - RNA, 32 nt, Human
uuggaaggggaagucucauacagguuauaggu

SEQ ID NO: 540952 - RNA, 32 nt, Human
uuggaaggggacccagagagaaaguccuggcu

SEQ ID NO: 540953 - RNA, 32 nt, Human
uuggaaggggaggcggggagagagugcuggag

SEQ ID NO: 540954 - RNA, 32 nt, Human
uuggaaguaacuuuggaaaagaauuccuucuu

SEQ ID NO: 540955 - RNA, 32 nt, Human
uuggaaguagggacccacugaguucccuccag

SEQ ID NO: 540956 - RNA, 32 nt, Human
uuggaaguccuggucugaauguggacccucuc

SEQ ID NO: 540957 - RNA, 22 nt, Human
uuggaagucgccggugcuguug

SEQ ID NO: 540958 - RNA, 32 nt, Human
uuggaagucuaagaucacacagccagcauggu

SEQ ID NO: 540959 - RNA, 25 nt, Human
uuggaagucucuggcuugugugcug

SEQ ID NO: 540960 - RNA, 32 nt, Human
uuggaagugagggucagagaggagucagagag

SEQ ID NO: 540961 - RNA, 21 nt, Human
uuggaaguuacgguauugcug

SEQ ID NO: 540962 - RNA, 21 nt, Human
uuggaaguucucuuggaccuu

SEQ ID NO: 540963 - RNA, 32 nt, Human
uuggaauaccaaaauugccuuaaaaauucccu

SEQ ID NO: 540964 - RNA, 32 nt, Human
uuggaauacccccauucuccuugccucuuagc

SEQ ID NO: 540965 - RNA, 32 nt, Human
uuggaauagaagguaaaauuucaaacagauug

SEQ ID NO: 540966 - RNA, 32 nt, Human
uuggaauccugugagcacuacucugaagguuu

SEQ ID NO: 540967 - RNA, 32 nt, Human
uuggaaucucaccacacgggugcucugaccug

SEQ ID NO: 540968 - RNA, 32 nt, Human
uuggaaucuccuccauuauuacccaggcuuug

SEQ ID NO: 540969 - RNA, 32 nt, Human
uuggaaugagggaggucucaagagauauaauu

SEQ ID NO: 540970 - RNA, 32 nt, Human
uuggaaugcuuuuccagggagagaggccaguu

SEQ ID NO: 540971 - RNA, 32 nt, Human
uuggaaugggguuugcuguucuucgggaacuu

SEQ ID NO: 540972 - RNA, 32 nt, Human
uuggaauguaacuccuggcacaguguuccugg

SEQ ID NO: 540973 - RNA, 22 nt, Human
uuggaauuacaggcgugagcca

SEQ ID NO: 540974 - RNA, 32 nt, Human
uuggaauuagauuuuucaaaacuaauaugugg

SEQ ID NO: 540975 - RNA, 32 nt, Human
uuggaauucauuggcuuccucuacccggccuc

SEQ ID NO: 540976 - RNA, 19 nt, Human
uuggaauuccaacugugga

SEQ ID NO: 540977 - RNA, 32 nt, Human
uuggaauucucaggaaugcauccuguggucua

SEQ ID NO: 540978 - RNA, 32 nt, Human
uuggaauuguccuugcucacaugcugccauca

SEQ ID NO: 540979 - RNA, 32 nt, Human
uuggaauuuggauagauuuaaaagugauagga

SEQ ID NO: 540980 - RNA, 20 nt, Human
uuggaauuuuccugggaccu

SEQ ID NO: 540981 - RNA, 18 nt, Human
uuggaauuuuggggcuuu

SEQ ID NO: 540982 - RNA, 32 nt, Human
uuggacaaaagcuuccggcuaaccagauucac

SEQ ID NO: 540983 - RNA, 32 nt, Human
uuggacaaaggaucagcacagcuggccuccag

SEQ ID NO: 540984 - RNA, 32 nt, Human
uuggacaauucagacuuuacuaaagcacaguu

SEQ ID NO: 540985 - RNA, 32 nt, Human
uuggacacaagaagacuugccuagaccacauc

SEQ ID NO: 540986 - RNA, 32 nt, Human
uuggacacagaagaaauccuagugcagccuuu

SEQ ID NO: 540987 - RNA, 32 nt, Human
uuggacacugaggcccucucugccuuuccugg

SEQ ID NO: 540988 - RNA, 32 nt, Human
uuggacacugcagcucuuuucaguuuuugcuu

SEQ ID NO: 540989 - RNA, 31 nt, Human
uuggacacuuaguuauuuaccaaagccuccg

SEQ ID NO: 540990 - RNA, 32 nt, Human
uuggacagaaaacugggccaggaaaaggcauc

SEQ ID NO: 540991 - RNA, 32 nt, Human
uuggacagaaaagaaggcucuggauuuaagcg

SEQ ID NO: 540992 - RNA, 32 nt, Human
uuggacagaaaaucacugugcugaucgggaag

SEQ ID NO: 540993 - RNA, 32 nt, Human
uuggacagaaggagguguuggggugagguggu

SEQ ID NO: 540994 - RNA, 32 nt, Human
uuggacagagggcgggagaugccauccccacu

SEQ ID NO: 540995 - RNA, 32 nt, Human
uuggacagcagcaccuuugagcgauggcggcg

SEQ ID NO: 540996 - RNA, 32 nt, Human
uuggacagcauugcagccaggagcuuaaaaga

SEQ ID NO: 540997 - RNA, 32 nt, Human
uuggacagcccugacccguccucugcaaccuc

SEQ ID NO: 540998 - RNA, 32 nt, Human
uuggacagccugggugugauggcaagacagua

SEQ ID NO: 540999 - RNA, 32 nt, Human
uuggacagcucuucuccucucuucaucccauc

SEQ ID NO: 541000 - RNA, 32 nt, Human
uuggacagcugacugaaugcagaacgguuuuu

SEQ ID NO: 541001 - RNA, 32 nt, Human
uuggacagggaugcagacacuguccauggcuc

SEQ ID NO: 541002 - RNA, 32 nt, Human
uuggacagggcuuucucucagguaggagaaau

SEQ ID NO: 541003 - RNA, 32 nt, Human
uuggacagggucucacuauguugcccaggcug

SEQ ID NO: 541004 - RNA, 21 nt, Human
uuggacagguaccuacugcug

SEQ ID NO: 541005 - RNA, 32 nt, Human
uuggacagguuguugcuuaaauaugcuaccau

SEQ ID NO: 541006 - RNA, 32 nt, Human
uuggacaguaggauucagcagagaaugagucc

SEQ ID NO: 541007 - RNA, 32 nt, Human
uuggacauguacugaaaauuaacacauguagu

SEQ ID NO: 541008 - RNA, 32 nt, Human
uuggaccaaagcaacaugagagcaaguacuuu

SEQ ID NO: 541009 - RNA, 32 nt, Human
uuggaccaagcagauaacaucacaagguguac

SEQ ID NO: 541010 - RNA, 32 nt, Human
uuggaccaagggcagaguggccacacuugaaa

SEQ ID NO: 541011 - RNA, 32 nt, Human
uuggaccacguaaggcauucucugauuuagug

SEQ ID NO: 541012 - RNA, 32 nt, Human
uuggaccacuauacuccagccuggcaacagag

SEQ ID NO: 541013 - RNA, 32 nt, Human
uuggaccacugcucuccagccugggcaacaga

SEQ ID NO: 541014 - RNA, 32 nt, Human
uuggaccagcuucucacacucacaccuuccua

SEQ ID NO: 541015 - RNA, 32 nt, Human
uuggaccagucugaauccagaggaucaggauc

SEQ ID NO: 541016 - RNA, 32 nt, Human
uuggaccaguguuugcuuagugucuucacugu

SEQ ID NO: 541017 - RNA, 32 nt, Human
uuggacccaagauugaaaacccaaggcagguu

SEQ ID NO: 541018 - RNA, 32 nt, Human
uuggacccagaccccugcccacugaccgcaac

SEQ ID NO: 541019 - RNA, 32 nt, Human
uuggacccaggcagcagccacagaggggccca

SEQ ID NO: 541020 - RNA, 28 nt, Human
uuggacccauagguagccucaucccugc

SEQ ID NO: 541021 - RNA, 32 nt, Human
uuggaccccucccagccugugaccuuugugac

SEQ ID NO: 541022 - RNA, 32 nt, Human
uuggaccccugccucucaacauagaugaaaau

SEQ ID NO: 541023 - RNA, 32 nt, Human
uuggaccccugccucuuaacauagaugaaaau

SEQ ID NO: 541024 - RNA, 18 nt, Human
uuggaccccuggggccuu

SEQ ID NO: 541025 - RNA, 32 nt, Human
uuggacccgagcgauccucccgcuucggccuc

SEQ ID NO: 541026 - RNA, 32 nt, Human
uuggacccgcagcugcugugcugcucugugcc

SEQ ID NO: 541027 - RNA, 32 nt, Human
uuggacccgggaggcggagguugcagugagcc

SEQ ID NO: 541028 - RNA, 20 nt, Human
uuggacccucaugggaucuu

SEQ ID NO: 541029 - RNA, 32 nt, Human
uuggacccucucuuggcaaagacaaccauagu

SEQ ID NO: 541030 - RNA, 32 nt, Human
uuggacccugccgaagcucccugccuuuaaua

SEQ ID NO: 541031 - RNA, 32 nt, Human
uuggacccuggagguagaggcugcagugagcc

SEQ ID NO: 541032 - RNA, 32 nt, Human
uuggacccuguagacccagcaggagccuggcc

SEQ ID NO: 541033 - RNA, 32 nt, Human
uuggacccuguccagcacagcuucuggcacag

SEQ ID NO: 541034 - RNA, 32 nt, Human
uuggaccuagcagcucaugccuguaaucucca

SEQ ID NO: 541035 - RNA, 32 nt, Human
uuggaccuaggagguggagguugcagugagcu

SEQ ID NO: 541036 - RNA, 32 nt, Human
uuggaccuauauggccaugcucuggcucuacc

SEQ ID NO: 541037 - RNA, 32 nt, Human
uuggaccucauagcuuauuuuaguuaaucuuu

SEQ ID NO: 541038 - RNA, 32 nt, Human
uuggaccuccuuggccugacccauucuguggg

SEQ ID NO: 541039 - RNA, 32 nt, Human
uuggaccucuuugguucucuccccuuucaagu

SEQ ID NO: 541040 - RNA, 32 nt, Human
uuggaccugggagguggagguugcagugagcu

SEQ ID NO: 541041 - RNA, 32 nt, Human
uuggaccuuauggucacccaacucaaggacag

SEQ ID NO: 541042 - RNA, 32 nt, Human
uuggaccuucuuucuguucucuuuacucuucu

SEQ ID NO: 541043 - RNA, 23 nt, Human
uuggacgcagcccccugcugcug

SEQ ID NO: 541044 - RNA, 32 nt, Human
uuggacggaacagauccggggacucucuucca

SEQ ID NO: 541045 - RNA, 32 nt, Human
uuggacggagucuugcucugucucccaggcug

SEQ ID NO: 541046 - RNA, 32 nt, Human
uuggacggaguuucaccauguuggccaggcug

SEQ ID NO: 541047 - RNA, 32 nt, Human
uuggacgggaagagacaggcaggagucggaau

SEQ ID NO: 541048 - RNA, 31 nt, Human
uuggacgggcacuuccuugacaauuccuauu

SEQ ID NO: 541049 - RNA, 32 nt, Human
uuggacggggcaucaguucuucauuuguggag

SEQ ID NO: 541050 - RNA, 32 nt, Human
uuggacuacagguacaugccaccacaccuggc

SEQ ID NO: 541051 - RNA, 32 nt, Human
uuggacuaccagaaucaagcacucuuuuggaa

SEQ ID NO: 541052 - RNA, 32 nt, Human
uuggacuacguucuuggcuccagaccuggaau

SEQ ID NO: 541053 - RNA, 32 nt, Human
uuggacuauggagugcaccaaagagaaugccc

SEQ ID NO: 541054 - RNA, 32 nt, Human
uuggacucaaacaauccucccaucucgccucc

SEQ ID NO: 541055 - RNA, 32 nt, Human
uuggacucacccagaucuagugcagggacaca

SEQ ID NO: 541056 - RNA, 32 nt, Human
uuggacucacuguggcuggacggaggggaccc

SEQ ID NO: 541057 - RNA, 32 nt, Human
uuggacucaggccucagagccuggccugguug

SEQ ID NO: 541058 - RNA, 32 nt, Human
uuggacucauguccucauugcuucacucaauu

SEQ ID NO: 541059 - RNA, 32 nt, Human
uuggacucauugacuccagcuaaugaagauca

SEQ ID NO: 541060 - RNA, 32 nt, Human
uuggacucccaaagugcugggauuacagacgu

SEQ ID NO: 541061 - RNA, 32 nt, Human
uuggacucccaaagugcugggauuacaggcuu

SEQ ID NO: 541062 - RNA, 32 nt, Human
uuggacucccacucucaagacuccucacuugc

SEQ ID NO: 541063 - RNA, 32 nt, Human
uuggacucucccagguuccacagaacaguaau

SEQ ID NO: 541064 - RNA, 32 nt, Human
uuggacucuccccucuuauguaccucuuuuag

SEQ ID NO: 541065 - RNA, 32 nt, Human
uuggacucugccugggcuggagucuagggcug

SEQ ID NO: 541066 - RNA, 32 nt, Human
uuggacucugccuucaaacaaaggcaguucag

SEQ ID NO: 541067 - RNA, 32 nt, Human
uuggacucuguaacucauaggugcauucuuuu

SEQ ID NO: 541068 - RNA, 32 nt, Human
uuggacucuuucccaucuccccuggggagccu

SEQ ID NO: 541069 - RNA, 32 nt, Human
uuggacugagucuugcucuguugcccaugcuu

SEQ ID NO: 541070 - RNA, 32 nt, Human
uuggacugauucccagucuccugggucaagcc

SEQ ID NO: 541071 - RNA, 32 nt, Human
uuggacuggacucaggcuggaggcagauagac

SEQ ID NO: 541072 - RNA, 32 nt, Human
uuggacuggacuuugaugagauauaaucucau

SEQ ID NO: 541073 - RNA, 19 nt, Human
uuggacugguggcaucaug

SEQ ID NO: 541074 - RNA, 32 nt, Human
uuggacuggugggaacugggaacacuggagac

SEQ ID NO: 541075 - RNA, 32 nt, Human
uuggacuguaagggauugaaggggguaccuua

SEQ ID NO: 541076 - RNA, 32 nt, Human
uuggacuguggggcauguggccgcugcaguuc

SEQ ID NO: 541077 - RNA, 32 nt, Human
uuggacuguuuaugaccuacuggcuccuuuaa

SEQ ID NO: 541078 - RNA, 32 nt, Human
uuggacuuaacacccuugccuuucugggacuu

SEQ ID NO: 541079 - RNA, 32 nt, Human
uuggacuucaguccucccucggggacucaccu

SEQ ID NO: 541080 - RNA, 32 nt, Human
uuggacuugagacccuucacaccccagcagcg

SEQ ID NO: 541081 - RNA, 32 nt, Human
uuggacuugauucaaagaaugcaguuuguguu

SEQ ID NO: 541082 - RNA, 23 nt, Human
uuggacuugccaugagguguuga

SEQ ID NO: 541083 - RNA, 32 nt, Human
uuggacuugggaggcgguuguugcagugagcu

SEQ ID NO: 541084 - RNA, 32 nt, Human
uuggacuuggguuccuggauggugggauuguu

SEQ ID NO: 541085 - RNA, 32 nt, Human
uuggacuuuacguuuaaacacaauucaauccg

SEQ ID NO: 541086 - RNA, 32 nt, Human
uuggacuuuuuggauuuuacaggacaggacua

SEQ ID NO: 541087 - RNA, 32 nt, Human
uuggagaaaccaggucggaaauaccucuccag

SEQ ID NO: 541088 - RNA, 32 nt, Human
uuggagaacucauguaacccuccuguuucuua

SEQ ID NO: 541089 - RNA, 32 nt, Human
uuggagaacugaggcugaggguagagggagua

SEQ ID NO: 541090 - RNA, 32 nt, Human
uuggagaagaaccuagagagacagggaagguu

SEQ ID NO: 541091 - RNA, 32 nt, Human
uuggagaagcuacagccugugcucaguugagu

SEQ ID NO: 541092 - RNA, 32 nt, Human
uuggagaaggcaaggaaggaggcggugacaga

SEQ ID NO: 541093 - RNA, 32 nt, Human
uuggagaagguagaggaggagaaagaauccaa

SEQ ID NO: 541094 - RNA, 32 nt, Human
uuggagaauagggaugaugauagcauggaugu

SEQ ID NO: 541095 - RNA, 32 nt, Human
uuggagacaagaaaauuuuauuaugacucuag

SEQ ID NO: 541096 - RNA, 24 nt, Human
uuggagacaagccugggcaacaug

SEQ ID NO: 541097 - RNA, 32 nt, Human
uuggagacaagccugggcaacauggugaaacu

SEQ ID NO: 541098 - RNA, 32 nt, Human
uuggagacagaccuacacuaccaguuuucacc

SEQ ID NO: 541099 - RNA, 32 nt, Human
uuggagacagccgccaccccacaggccgggcu

SEQ ID NO: 541100 - RNA, 32 nt, Human
uuggagacaggcaggaggugggggaagagcug

SEQ ID NO: 541101 - RNA, 24 nt, Human
uuggagaccaaccugggcaacaua

SEQ ID NO: 541102 - RNA, 32 nt, Human
uuggagaccaaccugggcaacauagcaagacc

SEQ ID NO: 541103 - RNA, 32 nt, Human
uuggagaccaaccugggcaacauagugagacc

SEQ ID NO: 541104 - RNA, 32 nt, Human
uuggagaccagccagagcaacacagugagacc

SEQ ID NO: 541105 - RNA, 24 nt, Human
uuggagaccagccuaggcaacaug

SEQ ID NO: 541106 - RNA, 32 nt, Human
uuggagaccagccuaggcaacauggcgaaacc

SEQ ID NO: 541107 - RNA, 32 nt, Human
uuggagaccagccugaccaacauggacaaacc

SEQ ID NO: 541108 - RNA, 32 nt, Human
uuggagaccagccugaccaacauggagaaacc

SEQ ID NO: 541109 - RNA, 24 nt, Human
uuggagaccagccugagcaacaua

SEQ ID NO: 541110 - RNA, 32 nt, Human
uuggagaccagccugagcaacauagugagacc

SEQ ID NO: 541111 - RNA, 32 nt, Human
uuggagaccagccugcccaacaugaugaaacc

SEQ ID NO: 541112 - RNA, 24 nt, Human
uuggagaccagccugcgcaacgua

SEQ ID NO: 541113 - RNA, 24 nt, Human
uuggagaccagccuggaugacaua

SEQ ID NO: 541114 - RNA, 32 nt, Human
uuggagaccagccuggaugacauaaugagauu

SEQ ID NO: 541115 - RNA, 24 nt, Human
uuggagaccagccuggccaacaua

SEQ ID NO: 541116 - RNA, 32 nt, Human
uuggagaccagccuggccaacauagugaaacc

SEQ ID NO: 541117 - RNA, 24 nt, Human
uuggagaccagccuggccaacaug

SEQ ID NO: 541118 - RNA, 32 nt, Human
uuggagaccagccuggccaacauggcgaaacc

SEQ ID NO: 541119 - RNA, 32 nt, Human
uuggagaccagccuggccaacauggugaaacc

SEQ ID NO: 541120 - RNA, 32 nt, Human
uuggagaccagccuggccaacguggcaaaacc

SEQ ID NO: 541121 - RNA, 32 nt, Human
uuggagaccagccuggccaagauggugaaacc

SEQ ID NO: 541122 - RNA, 24 nt, Human
uuggagaccagccuggccaauaug

SEQ ID NO: 541123 - RNA, 22 nt, Human
uuggagaccagccugggcaaca

SEQ ID NO: 541124 - RNA, 32 nt, Human
uuggagaccagccugggcaacacagugagaac

SEQ ID NO: 541125 - RNA, 24 nt, Human
uuggagaccagccugggcaacaua

SEQ ID NO: 541126 - RNA, 32 nt, Human
uuggagaccagccugggcaacauagcaagacu

SEQ ID NO: 541127 - RNA, 32 nt, Human
uuggagaccagccugggcaacauagugagacc

SEQ ID NO: 541128 - RNA, 24 nt, Human
uuggagaccagccugggcaacaug

SEQ ID NO: 541129 - RNA, 32 nt, Human
uuggagaccagccugggcaacauggcaaaacu

SEQ ID NO: 541130 - RNA, 32 nt, Human
uuggagaccagccugggcaacauggugagacc

SEQ ID NO: 541131 - RNA, 32 nt, Human
uuggagaccaggcuggccaacacggugaaacc

SEQ ID NO: 541132 - RNA, 32 nt, Human
uuggagaccagucuggccaauauggugaaacc

SEQ ID NO: 541133 - RNA, 32 nt, Human
uuggagaccagucugggcaacauggugaaacc

SEQ ID NO: 541134 - RNA, 32 nt, Human
uuggagaccaugucaggaaagaagcguaccca

SEQ ID NO: 541135 - RNA, 24 nt, Human
uuggagaccauuuccugugccaga

SEQ ID NO: 541136 - RNA, 32 nt, Human
uuggagaccugccugggcaacauagcaaggcc

SEQ ID NO: 541137 - RNA, 32 nt, Human
uuggagaccuggaggagcaggagacacaggag

SEQ ID NO: 541138 - RNA, 32 nt, Human
uuggagacggccaagugaaggagccagugccc

SEQ ID NO: 541139 - RNA, 32 nt, Human
uuggagacuagaaaauuacuuucccccuuuga

SEQ ID NO: 541140 - RNA, 32 nt, Human
uuggagacucaaaagacuaugaagugaucacu

SEQ ID NO: 541141 - RNA, 21 nt, Human
uuggagacucuguggggccuu

SEQ ID NO: 541142 - RNA, 32 nt, Human
uuggagacugaagagaaagagagagaggagaa

SEQ ID NO: 541143 - RNA, 20 nt, Human
uuggagacuuccugggacuu

SEQ ID NO: 541144 - RNA, 32 nt, Human
uuggagagaaaaucauuggucauuccauuaaa

SEQ ID NO: 541145 - RNA, 32 nt, Human
uuggagagaagagggacgacuggagaaucguc

SEQ ID NO: 541146 - RNA, 32 nt, Human
uuggagagaagggagagggcccgucggacagc

SEQ ID NO: 541147 - RNA, 32 nt, Human
uuggagagacaagaauuggucuccagcugccu

SEQ ID NO: 541148 - RNA, 32 nt, Human
uuggagagauagagucacuauuacugauaugg

SEQ ID NO: 541149 - RNA, 32 nt, Human
uuggagagaugagcuguaucaccugcagaugu

SEQ ID NO: 541150 - RNA, 32 nt, Human
uuggagagaugggguuucaccauguugccuag

SEQ ID NO: 541151 - RNA, 32 nt, Human
uuggagagcacuuggcccugccacugcccagg

SEQ ID NO: 541152 - RNA, 32 nt, Human
uuggagagcagacugggcaacauagcgagacc

SEQ ID NO: 541153 - RNA, 32 nt, Human
uuggagagcucaggaucuggccccagagaaag

SEQ ID NO: 541154 - RNA, 32 nt, Human
uuggagaggaaagaggaacggugaagacaagc

SEQ ID NO: 541155 - RNA, 32 nt, Human
uuggagaggaggcagccagcaguggcagucca

SEQ ID NO: 541156 - RNA, 32 nt, Human
uuggagaggcagaugacauuauaccugauuuu

SEQ ID NO: 541157 - RNA, 32 nt, Human
uuggagaggcagcaugauggaguggggauaac

SEQ ID NO: 541158 - RNA, 32 nt, Human
uuggagagggccugccugggacugagggggcc

SEQ ID NO: 541159 - RNA, 32 nt, Human
uuggagagucacuguucaccucagccuauuca

SEQ ID NO: 541160 - RNA, 32 nt, Human
uuggagaguggaggcagcagagaugggaaugg

SEQ ID NO: 541161 - RNA, 32 nt, Human
uuggagauaacuuggaguuuauuugaacauca

SEQ ID NO: 541162 - RNA, 32 nt, Human
uuggagauagaaaggcuccuccccaccaugua

SEQ ID NO: 541163 - RNA, 32 nt, Human
uuggagauagcaucaucacagagucucaggga

SEQ ID NO: 541164 - RNA, 32 nt, Human
uuggagaucagccuggcuaacuaacauggcua

SEQ ID NO: 541165 - RNA, 24 nt, Human
uuggagaucagccugggcaacaug

SEQ ID NO: 541166 - RNA, 32 nt, Human
uuggagaucagccugggcaacauggccagacc

SEQ ID NO: 541167 - RNA, 32 nt, Human
uuggagauccugcuucccagaccacagcugug

SEQ ID NO: 541168 - RNA, 32 nt, Human
uuggagaugaggaacagacccaggaagaugac

SEQ ID NO: 541169 - RNA, 32 nt, Human
uuggagauggaacaugccuccucuccauucag

SEQ ID NO: 541170 - RNA, 32 nt, Human
uuggagaugguucugcccacucugauuucucu

SEQ ID NO: 541171 - RNA, 32 nt, Human
uuggagauguuacugaaguugauugagcaaua

SEQ ID NO: 541172 - RNA, 32 nt, Human
uuggagauugacaaaaagguaacacgugaugu

SEQ ID NO: 541173 - RNA, 32 nt, Human
uuggagauugagcagaugaggcuugggaugcc

SEQ ID NO: 541174 - RNA, 23 nt, Human
uuggagauuuauccugugcaaga

SEQ ID NO: 541175 - RNA, 32 nt, Human
uuggagcaaaggcaagggcagauggaaaguuc

SEQ ID NO: 541176 - RNA, 32 nt, Human
uuggagcaccugccggcagaguuccccagccu

SEQ ID NO: 541177 - RNA, 32 nt, Human
uuggagcacuauauguacucucuggacuacuu

SEQ ID NO: 541178 - RNA, 32 nt, Human
uuggagcaggaugagggaauccugucaccauc

SEQ ID NO: 541179 - RNA, 32 nt, Human
uuggagcaggauggcuccucuaagaaucucac

SEQ ID NO: 541180 - RNA, 32 nt, Human
uuggagcaggauucagaaggggcuccuguccu

SEQ ID NO: 541181 - RNA, 32 nt, Human
uuggagcauccauggauugcagugaucauuaa

SEQ ID NO: 541182 - RNA, 32 nt, Human
uuggagcaugccauuggaaaacccacccccac

SEQ ID NO: 541183 - RNA, 32 nt, Human
uuggagccaagcucuuagguuccucuuauuug

SEQ ID NO: 541184 - RNA, 25 nt, Human
uuggagccacguguuuuuauugcug

SEQ ID NO: 541185 - RNA, 32 nt, Human
uuggagccacugcucaccucaaacaguacaaa

SEQ ID NO: 541186 - RNA, 32 nt, Human
uuggagccagagauuucaugucugauugaugg

SEQ ID NO: 541187 - RNA, 23 nt, Human
uuggagccagccaggauggggug

SEQ ID NO: 541188 - RNA, 32 nt, Human
uuggagccagcuguuuccaguuguuacugaag

SEQ ID NO: 541189 - RNA, 32 nt, Human
uuggagccaggaacaggcaggagcccagcccu

SEQ ID NO: 541190 - RNA, 32 nt, Human
uuggagccaggaguuugagaccagccugggca

SEQ ID NO: 541191 - RNA, 32 nt, Human
uuggagccauuuuuaguggggagaacucuugg

SEQ ID NO: 541192 - RNA, 32 nt, Human
uuggagcccacagucuccuucacugcacgugu

SEQ ID NO: 541193 - RNA, 32 nt, Human
uuggagcccugccucugagccuggacgggaag

SEQ ID NO: 541194 - RNA, 21 nt, Human
uuggagccgccaugcagcccc

SEQ ID NO: 541195 - RNA, 32 nt, Human
uuggagccucgggcuccuggggugcagggugc

SEQ ID NO: 541196 - RNA, 32 nt, Human
uuggagccugaggcaccaugccuaccuagggc

SEQ ID NO: 541197 - RNA, 32 nt, Human
uuggagccugcagggcaggucaggcugguuca

SEQ ID NO: 541198 - RNA, 22 nt, Human
uuggagccugguccuugcuuug

SEQ ID NO: 541199 - RNA, 32 nt, Human
uuggagccuugugguggaauccccuuuucccc

SEQ ID NO: 541200 - RNA, 22 nt, Human
uuggagccuuucugcugagcua

SEQ ID NO: 541201 - RNA, 32 nt, Human
uuggagccuuucugcugagcuagaccaucuuu

SEQ ID NO: 541202 - RNA, 32 nt, Human
uuggagccuuuggaccuauagcucaaggccag

SEQ ID NO: 541203 - RNA, 32 nt, Human
uuggagcuaggccugguggcgugcucuagccc

SEQ ID NO: 541204 - RNA, 32 nt, Human
uuggagcuauucaggaauugcagagaaaugca

SEQ ID NO: 541205 - RNA, 32 nt, Human
uuggagcucacuggucccugccucuggggcuu

SEQ ID NO: 541206 - RNA, 32 nt, Human
uuggagcuccuagagggaagcuucuggaaagg

SEQ ID NO: 541207 - RNA, 18 nt, Human
uuggagcuccuggggccu

SEQ ID NO: 541208 - RNA, 19 nt, Human
uuggagcugaaggaaccug

SEQ ID NO: 541209 - RNA, 18 nt, Human
uuggagcugaggggcaag

SEQ ID NO: 541210 - RNA, 17 nt, Human
uuggagcugccgccugg

SEQ ID NO: 541211 - RNA, 32 nt, Human
uuggagcugccugucugcauguauccucuggc

SEQ ID NO: 541212 - RNA, 23 nt, Human
uuggagcuggacggagaaacugg

SEQ ID NO: 541213 - RNA, 19 nt, Human
uuggagcugggaagccugg

SEQ ID NO: 541214 - RNA, 32 nt, Human
uuggagcugggaggguggaggugugggagcug

SEQ ID NO: 541215 - RNA, 21 nt, Human
uuggagcugugcaaauguuaa

SEQ ID NO: 541216 - RNA, 32 nt, Human
uuggagcuucagagccauggcaaccaaggagu

SEQ ID NO: 541217 - RNA, 20 nt, Human
uuggagcuuccugggcccuu

SEQ ID NO: 541218 - RNA, 31 nt, Human
uuggaggaaacaaucucugccaccaccaagu

SEQ ID NO: 541219 - RNA, 19 nt, Human
uuggaggaauaucguaggu

SEQ ID NO: 541220 - RNA, 20 nt, Human
uuggaggacagcagugaggu

SEQ ID NO: 541221 - RNA, 18 nt, Human
uuggaggagaccagggug

SEQ ID NO: 541222 - RNA, 32 nt, Human
uuggaggagagcagcucccacuguggggacac

SEQ ID NO: 541223 - RNA, 32 nt, Human
uuggaggagagggagggggaggacauggcacc

SEQ ID NO: 541224 - RNA, 20 nt, Human
uuggaggagaugacuguggu

SEQ ID NO: 541225 - RNA, 23 nt, Human
uuggaggagaugagaaggaagug

SEQ ID NO: 541226 - RNA, 32 nt, Human
uuggaggagcagugguggggguagcugucacc

SEQ ID NO: 541227 - RNA, 21 nt, Human
uuggaggagccgcgugccaga

SEQ ID NO: 541228 - RNA, 20 nt, Human
uuggaggagcuggaaaggug

SEQ ID NO: 541229 - RNA, 19 nt, Human
uuggaggaggaggaggagg

SEQ ID NO: 541230 - RNA, 32 nt, Human
uuggaggaggaggaggaggaggagaggggccu

SEQ ID NO: 541231 - RNA, 32 nt, Human
uuggaggaggcagagccaugaccaaggggacc

SEQ ID NO: 541232 - RNA, 23 nt, Human
uuggaggagggaggcaggaggug

SEQ ID NO: 541233 - RNA, 22 nt, Human
uuggaggagggaguaagaggug

SEQ ID NO: 541234 - RNA, 19 nt, Human
uuggaggagggaguggagu

SEQ ID NO: 541235 - RNA, 32 nt, Human
uuggaggagggcaaaaguuggaaguaagaagu

SEQ ID NO: 541236 - RNA, 32 nt, Human
uuggaggagggcaagcugccacuggugucagc

SEQ ID NO: 541237 - RNA, 32 nt, Human
uuggaggagggcagaggcagugugggcugaug

SEQ ID NO: 541238 - RNA, 32 nt, Human
uuggaggagguggcggcgggcagaggugaugu

SEQ ID NO: 541239 - RNA, 32 nt, Human
uuggaggaggugggacuugagcuggacccaug

SEQ ID NO: 541240 - RNA, 32 nt, Human
uuggaggauacccagugucuauucuggguuag

SEQ ID NO: 541241 - RNA, 22 nt, Human
uuggaggauccugaggugggug

SEQ ID NO: 541242 - RNA, 31 nt, Human
uuggaggaucuacuggagguguuuguaagga

SEQ ID NO: 541243 - RNA, 22 nt, Human
uuggaggauggcuucugcugcu

SEQ ID NO: 541244 - RNA, 22 nt, Human
uuggaggauggugggagaagug

SEQ ID NO: 541245 - RNA, 32 nt, Human
uuggaggauucuggguacauuuugucauggaa

SEQ ID NO: 541246 - RNA, 32 nt, Human
uuggaggcagcuauugguugcuuucuuggagg

SEQ ID NO: 541247 - RNA, 32 nt, Human
uuggaggccacuggagggaggggugagcaugg

SEQ ID NO: 541248 - RNA, 32 nt, Human
uuggaggccagcccaguguggaagagagguac

SEQ ID NO: 541249 - RNA, 32 nt, Human
uuggaggccagccuggaucugucucucccuuc

SEQ ID NO: 541250 - RNA, 32 nt, Human
uuggaggccagccuggccaaaauggcaaaacc

SEQ ID NO: 541251 - RNA, 22 nt, Human
uuggaggccagccugggcaaca

SEQ ID NO: 541252 - RNA, 32 nt, Human
uuggaggccagccugggcaacacagcaagacc

SEQ ID NO: 541253 - RNA, 32 nt, Human
uuggaggccaggaguuggagaucagccugggc

SEQ ID NO: 541254 - RNA, 32 nt, Human
uuggaggcccugcucaggaggcccugaccgug

SEQ ID NO: 541255 - RNA, 19 nt, Human
uuggaggcccuggggccuu

SEQ ID NO: 541256 - RNA, 21 nt, Human
uuggaggccuccaagcugcug

SEQ ID NO: 541257 - RNA, 32 nt, Human
uuggaggccugguccuggaacugagccggggc

SEQ ID NO: 541258 - RNA, 32 nt, Human
uuggaggccuucaucccucucuacgauaaggu

SEQ ID NO: 541259 - RNA, 32 nt, Human
uuggaggcgagaagagagaaugugcugucuau

SEQ ID NO: 541260 - RNA, 18 nt, Human
uuggaggcucuuuucuca

SEQ ID NO: 541261 - RNA, 32 nt, Human
uuggaggcugacuguagggcugggcagcuggg

SEQ ID NO: 541262 - RNA, 32 nt, Human
uuggaggcugaguucugguucaugcagacaaa

SEQ ID NO: 541263 - RNA, 32 nt, Human
uuggaggcugcaguaagcuaugaucaugccac

SEQ ID NO: 541264 - RNA, 32 nt, Human
uuggaggcuggcugggccucuguccagucccc

SEQ ID NO: 541265 - RNA, 27 nt, Human
uuggaggcuuuaaaguucuuucuguug

SEQ ID NO: 541266 - RNA, 32 nt, Human
uuggagggacuggacuccucuccagcucccca

SEQ ID NO: 541267 - RNA, 32 nt, Human
uuggagggagaagggaauugcacuucacacug

SEQ ID NO: 541268 - RNA, 32 nt, Human
uuggagggagaggcaccuuucucauccucucu

SEQ ID NO: 541269 - RNA, 20 nt, Human
uuggagggagcggaugggug

SEQ ID NO: 541270 - RNA, 32 nt, Human
uuggagggaggaagaaagggagccggcguuca

SEQ ID NO: 541271 - RNA, 32 nt, Human
uuggagggaggaaucccuuccucccggugauc

SEQ ID NO: 541272 - RNA, 32 nt, Human
uuggagggaggugaguuuagggagggccagga

SEQ ID NO: 541273 - RNA, 32 nt, Human
uuggagggauccucuucucuuaggauuaaugu

SEQ ID NO: 541274 - RNA, 32 nt, Human
uuggagggcaggcacgaagaacagugagauug

SEQ ID NO: 541275 - RNA, 32 nt, Human
uuggagggcugaagcaggaggauugcuugagg

SEQ ID NO: 541276 - RNA, 32 nt, Human
uuggagggcugagaaggggcagcucugaauac

SEQ ID NO: 541277 - RNA, 22 nt, Human
uuggaggggagaggggaaggug

SEQ ID NO: 541278 - RNA, 32 nt, Human
uuggagggucaucacucuacacccucaggugc

SEQ ID NO: 541279 - RNA, 24 nt, Human
uuggagggugcccuccuucugcug

SEQ ID NO: 541280 - RNA, 32 nt, Human
uuggagggugggcagaagaugggcagucggca

SEQ ID NO: 541281 - RNA, 32 nt, Human
uuggaggguugcauggcggcugggcaaaggug

SEQ ID NO: 541282 - RNA, 32 nt, Human
uuggagguaagagagaaaaugaaagaacaccu

SEQ ID NO: 541283 - RNA, 32 nt, Human
uuggagguagcagugcuagcucugccuucagg

SEQ ID NO: 541284 - RNA, 32 nt, Human
uuggagguagguggugagucugagaaaggggc

SEQ ID NO: 541285 - RNA, 32 nt, Human
uuggaggucuggauccagucucucuuuguuuu

SEQ ID NO: 541286 - RNA, 32 nt, Human
uuggaggugaccauccaggcaggccuggcuca

SEQ ID NO: 541287 - RNA, 19 nt, Human
uuggaggugacccaggaga

SEQ ID NO: 541288 - RNA, 32 nt, Human
uuggaggugcuuaagcagaagcauuaacuucu

SEQ ID NO: 541289 - RNA, 32 nt, Human
uuggagguuaaggcauacgagagcagaggucu

SEQ ID NO: 541290 - RNA, 32 nt, Human
uuggagguugacuaauaagaaaguuggcauaa

SEQ ID NO: 541291 - RNA, 32 nt, Human
uuggagguuucucggccuuuucugugccacuu

SEQ ID NO: 541292 - RNA, 32 nt, Human
uuggaguagcccguguguggaauucuaaagug

SEQ ID NO: 541293 - RNA, 32 nt, Human
uuggaguagggugggccccaauucaaggacug

SEQ ID NO: 541294 - RNA, 32 nt, Human
uuggaguauuucaucagcugaaaagugauucu

SEQ ID NO: 541295 - RNA, 32 nt, Human
uuggagucaaacacuggaugcagaaauuuugg

SEQ ID NO: 541296 - RNA, 32 nt, Human
uuggagucaaugcucucuagaaaacuaaaucc

SEQ ID NO: 541297 - RNA, 32 nt, Human
uuggagucacccauguggauaugauuuucagc

SEQ ID NO: 541298 - RNA, 32 nt, Human
uuggagucagucauuuuccucaucuagcugaa

SEQ ID NO: 541299 - RNA, 32 nt, Human
uuggagucaucuuaucuauuacuccaaaccuc

SEQ ID NO: 541300 - RNA, 24 nt, Human
uuggaguccagccugggcaacaua

SEQ ID NO: 541301 - RNA, 32 nt, Human
uuggagucccugaaggacccaggauuugcugg

SEQ ID NO: 541302 - RNA, 32 nt, Human
uuggaguccuggaagagagagaugagccaggg

SEQ ID NO: 541303 - RNA, 32 nt, Human
uuggaguccuggucccccuccucccuggcccu

SEQ ID NO: 541304 - RNA, 21 nt, Human
uuggagucucagggcagggug

SEQ ID NO: 541305 - RNA, 32 nt, Human
uuggagucucuuucucagacuuccucagcgca

SEQ ID NO: 541306 - RNA, 32 nt, Human
uuggagucugcuggugcgguguuuacacacca

SEQ ID NO: 541307 - RNA, 32 nt, Human
uuggagucuuaggcaucucugguacagugggg

SEQ ID NO: 541308 - RNA, 32 nt, Human
uuggagugaaguuuaauguugccaauggaggu

SEQ ID NO: 541309 - RNA, 32 nt, Human
uuggagugaguagauuugaggguccaguuaug

SEQ ID NO: 541310 - RNA, 21 nt, Human
uuggagugauggaaagucugg

SEQ ID NO: 541311 - RNA, 32 nt, Human
uuggagugccgggaaaaguuccagggucccca

SEQ ID NO: 541312 - RNA, 32 nt, Human
uuggagugcugcacaaacaaacauaagagcaa

SEQ ID NO: 541313 - RNA, 32 nt, Human
uuggaguggcugcuucugcuauagagaacauu

SEQ ID NO: 541314 - RNA, 32 nt, Human
uuggaguggguggccaucaugcauggccuggg

SEQ ID NO: 541315 - RNA, 32 nt, Human
uuggaguucaaaggaacaccagcucugaaaac

SEQ ID NO: 541316 - RNA, 32 nt, Human
uuggaguucacuccaaucauccaguggucccu

SEQ ID NO: 541317 - RNA, 32 nt, Human
uuggaguuccucagagcuuacuauacgcgguc

SEQ ID NO: 541318 - RNA, 32 nt, Human
uuggaguuccuucccuuccagaguccuuauug

SEQ ID NO: 541319 - RNA, 32 nt, Human
uuggaguugaguccugccuucuaccuccuugc

SEQ ID NO: 541320 - RNA, 32 nt, Human
uuggaguuggagggugagagaaaaugaauucu

SEQ ID NO: 541321 - RNA, 32 nt, Human
uuggaguugguuagauuggaccucuuuuacug

SEQ ID NO: 541322 - RNA, 32 nt, Human
uuggaguuuaauccuuugcuucaucuuucuac

SEQ ID NO: 541323 - RNA, 21 nt, Human
uuggaguuuccagcagggugg

SEQ ID NO: 541324 - RNA, 32 nt, Human
uuggaguuuccagcaggguggugugcaccacu

SEQ ID NO: 541325 - RNA, 32 nt, Human
uuggaguuugggguauaaaacacuccucccug

SEQ ID NO: 541326 - RNA, 32 nt, Human
uuggauaaaauggcuuuuccacauugcaacuu

SEQ ID NO: 541327 - RNA, 32 nt, Human
uuggauaacaacugcacuccagccuggaugac

SEQ ID NO: 541328 - RNA, 32 nt, Human
uuggauaaccacccccucaaacugagaccugg

SEQ ID NO: 541329 - RNA, 32 nt, Human
uuggauaacgacugcacuccagccuggaugac

SEQ ID NO: 541330 - RNA, 32 nt, Human
uuggauaagcauaucaagacccuucagagauu

SEQ ID NO: 541331 - RNA, 32 nt, Human
uuggauaauccccuccuugggggagagggauu

SEQ ID NO: 541332 - RNA, 21 nt, Human
uuggauaccaaagguuucuca

SEQ ID NO: 541333 - RNA, 32 nt, Human
uuggauaccuauuuaaauguguguucuguuuu

SEQ ID NO: 541334 - RNA, 20 nt, Human
uuggauaccuggcccgggau

SEQ ID NO: 541335 - RNA, 32 nt, Human
uuggauacugccagucccaggaggaaguagcc

SEQ ID NO: 541336 - RNA, 32 nt, Human
uuggauagagggcuggugccacgccccaggcu

SEQ ID NO: 541337 - RNA, 32 nt, Human
uuggauagcuaaauaucuuuguaagauagaga

SEQ ID NO: 541338 - RNA, 32 nt, Human
uuggauaggaaaggacuuagcacucaggccug

SEQ ID NO: 541339 - RNA, 32 nt, Human
uuggauaggaauagaagggaugaauucuaauu

SEQ ID NO: 541340 - RNA, 32 nt, Human
uuggauauccacuuacaguaagcuuuuuagua

SEQ ID NO: 541341 - RNA, 32 nt, Human
uuggauauccauccuccucgacuuauaguaca

SEQ ID NO: 541342 - RNA, 22 nt, Human
uuggauaucuuggcugcuguac

SEQ ID NO: 541343 - RNA, 32 nt, Human
uuggauaugaucuuucuuuucccaacauaugc

SEQ ID NO: 541344 - RNA, 32 nt, Human
uuggauauggccaggacccacagggacacagg

SEQ ID NO: 541345 - RNA, 32 nt, Human
uuggauauuucaucuggaguggacaaguacaa

SEQ ID NO: 541346 - RNA, 32 nt, Human
uuggaucaagacgauccaggagagcagcaacc

SEQ ID NO: 541347 - RNA, 32 nt, Human
uuggaucacaggaaguggaggagccagaggug

SEQ ID NO: 541348 - RNA, 32 nt, Human
uuggaucaccacaaccuccgucucccagguuc

SEQ ID NO: 541349 - RNA, 32 nt, Human
uuggaucacuacaaccuccaccucccggguuc

SEQ ID NO: 541350 - RNA, 32 nt, Human
uuggaucagcccagaggauucaggauaggaca

SEQ ID NO: 541351 - RNA, 32 nt, Human
uuggaucaggcaggguggcucacaccuguaau

SEQ ID NO: 541352 - RNA, 32 nt, Human
uuggaucagugacuaagaggcugcaauaaggu

SEQ ID NO: 541353 - RNA, 32 nt, Human
uuggaucauagcccuggccuggcggcacagca

SEQ ID NO: 541354 - RNA, 32 nt, Human
uuggauccaaggagguguaauggaaucggaau

SEQ ID NO: 541355 - RNA, 32 nt, Human
uuggauccucauucucacccauuuggcuaauc

SEQ ID NO: 541356 - RNA, 32 nt, Human
uuggaucgcuuugacuucuccaacacgguuug

SEQ ID NO: 541357 - RNA, 32 nt, Human
uuggaucuauccagagagaguagacuugacac

SEQ ID NO: 541358 - RNA, 32 nt, Human
uuggaucuccaauugccucuugcaggcugagu

SEQ ID NO: 541359 - RNA, 32 nt, Human
uuggaucuggaucauuuggaacagucuacaag

SEQ ID NO: 541360 - RNA, 32 nt, Human
uuggaucugugcugaaaaauugugacauuuca

SEQ ID NO: 541361 - RNA, 32 nt, Human
uuggaucuguucagagcugacccccuagcaac

SEQ ID NO: 541362 - RNA, 32 nt, Human
uuggaucuugaguucguuccacacagcaagau

SEQ ID NO: 541363 - RNA, 20 nt, Human
uuggaucuuucagggauuuu

SEQ ID NO: 541364 - RNA, 32 nt, Human
uuggaugaagaaacaaagaggagagaucagau

SEQ ID NO: 541365 - RNA, 32 nt, Human
uuggaugaaguggugcccucuccucugguccc

SEQ ID NO: 541366 - RNA, 21 nt, Human
uuggaugauaagagugaggug

SEQ ID NO: 541367 - RNA, 32 nt, Human
uuggaugaucagacugaauuuugucaaguauc

SEQ ID NO: 541368 - RNA, 32 nt, Human
uuggaugauggagccaaagaggggaugcuuug

SEQ ID NO: 541369 - RNA, 32 nt, Human
uuggaugauugugugacuauucauggcuaccu

SEQ ID NO: 541370 - RNA, 32 nt, Human
uuggaugccugggaacuuuuuguacccauugu

SEQ ID NO: 541371 - RNA, 32 nt, Human
uuggauggagucuagcucugucacccaggcug

SEQ ID NO: 541372 - RNA, 32 nt, Human
uuggauggcugaggcaggagaaucgcuugaac

SEQ ID NO: 541373 - RNA, 32 nt, Human
uuggauggggauguuacccuugcguucaacca

SEQ ID NO: 541374 - RNA, 32 nt, Human
uuggauggggccaagguggagcugcuagaaag

SEQ ID NO: 541375 - RNA, 32 nt, Human
uuggaugggguuucaccauguuagccaggaug

SEQ ID NO: 541376 - RNA, 32 nt, Human
uuggauguauuuuuaauuaaugggaccucagg

SEQ ID NO: 541377 - RNA, 32 nt, Human
uuggaugucaugugacccugugccucaguuuc

SEQ ID NO: 541378 - RNA, 32 nt, Human
uuggauguccagaauccccuguaguugauaau

SEQ ID NO: 541379 - RNA, 28 nt, Human
uuggaugugaguugaugacaaauguuaa

SEQ ID NO: 541380 - RNA, 32 nt, Human
uuggauguggucucuacacuaaccuucuugau

SEQ ID NO: 541381 - RNA, 32 nt, Human
uuggauguggugagcccaguuucugccaagaa

SEQ ID NO: 541382 - RNA, 32 nt, Human
uuggauguuuggcguugcacacacacauccac

SEQ ID NO: 541383 - RNA, 32 nt, Human
uuggauuaagucauaugccuccagccauuaua

SEQ ID NO: 541384 - RNA, 32 nt, Human
uuggauucccacgucaaaggaaaguuucaagc

SEQ ID NO: 541385 - RNA, 32 nt, Human
uuggauuccgucucccugcuccaugccuaccc

SEQ ID NO: 541386 - RNA, 32 nt, Human
uuggauucuacagaaagguucuguuggauucu

SEQ ID NO: 541387 - RNA, 32 nt, Human
uuggauucucauaagaagcacgcaaccuagau

SEQ ID NO: 541388 - RNA, 32 nt, Human
uuggauucugaguacagaacauguuauauugu

SEQ ID NO: 541389 - RNA, 32 nt, Human
uuggauugaaugaaaacagagagcuggggcuu

SEQ ID NO: 541390 - RNA, 32 nt, Human
uuggauugaugucuuuuauugguuucucaugg

SEQ ID NO: 541391 - RNA, 32 nt, Human
uuggauugcaugguuggacugagaucuauugg

SEQ ID NO: 541392 - RNA, 32 nt, Human
uuggauugcccucuuucaauuuccuugugaaa

SEQ ID NO: 541393 - RNA, 32 nt, Human
uuggauugcgaggcuagggcuuggggagucgu

SEQ ID NO: 541394 - RNA, 32 nt, Human
uuggauuggccaccaccccuccucacucucac

SEQ ID NO: 541395 - RNA, 32 nt, Human
uuggauuggucaucucaguauccggaguuacu

SEQ ID NO: 541396 - RNA, 32 nt, Human
uuggauugugccggcuaagaccugccagggag

SEQ ID NO: 541397 - RNA, 32 nt, Human
uuggauuugaccccuuggcucucaaguguccc

SEQ ID NO: 541398 - RNA, 32 nt, Human
uuggauuugaccuucaaaauugaaggucguuc

SEQ ID NO: 541399 - RNA, 32 nt, Human
uuggauuuggaaggcuugcaaugugguugacu

SEQ ID NO: 541400 - RNA, 32 nt, Human
uuggauuuugaauuuguauuucccucuaagug

SEQ ID NO: 541401 - RNA, 32 nt, Human
uuggauuuuguuguuugauggaauuugagcca

SEQ ID NO: 541402 - RNA, 32 nt, Human
uuggcaaaagaacagugucacacagauuccua

SEQ ID NO: 541403 - RNA, 32 nt, Human
uuggcaaacuccgcccuccacuuacuauuuug

SEQ ID NO: 541404 - RNA, 32 nt, Human
uuggcaacaacaaaaagccucuuucuugacuu

SEQ ID NO: 541405 - RNA, 32 nt, Human
uuggcaacacagugugagacccugucucaaaa

SEQ ID NO: 541406 - RNA, 32 nt, Human
uuggcaacauggugaaaccccaucuccaccaa

SEQ ID NO: 541407 - RNA, 32 nt, Human
uuggcaacccacacccuuccacacacgcucac

SEQ ID NO: 541408 - RNA, 32 nt, Human
uuggcaacucagcugcugcugcuuccaugugu

SEQ ID NO: 541409 - RNA, 22 nt, Human
uuggcaacuggucugcauguaa

SEQ ID NO: 541410 - RNA, 32 nt, Human
uuggcaagaaggcaggaguauguaugaggucc

SEQ ID NO: 541411 - RNA, 32 nt, Human
uuggcaagcgugccuugucggcuggguuaagc

SEQ ID NO: 541412 - RNA, 32 nt, Human
uuggcaagcuggauuucucagagccagcaugu

SEQ ID NO: 541413 - RNA, 32 nt, Human
uuggcaaggcccaagccuucuucaagaaggga

SEQ ID NO: 541414 - RNA, 32 nt, Human
uuggcaagugccugugcagggcccggccgccc

SEQ ID NO: 541415 - RNA, 32 nt, Human
uuggcaauccacuggucccuggacccggauaa

SEQ ID NO: 541416 - RNA, 32 nt, Human
uuggcaauugugaauaaugcugcaacaaauau

SEQ ID NO: 541417 - RNA, 32 nt, Human
uuggcacacaaaauauguaugcaguugcucca

SEQ ID NO: 541418 - RNA, 32 nt, Human
uuggcacacagugggagcucugagaacauggg

SEQ ID NO: 541419 - RNA, 32 nt, Human
uuggcacagaggacucuucugauaacuugaaa

SEQ ID NO: 541420 - RNA, 32 nt, Human
uuggcacagcagccggugucuccugcgcccgc

SEQ ID NO: 541421 - RNA, 32 nt, Human
uuggcaccagcucugagagcccuuccccugug

SEQ ID NO: 541422 - RNA, 32 nt, Human
uuggcaccaggagucccuguagccuggcuagg

SEQ ID NO: 541423 - RNA, 32 nt, Human
uuggcaccaucuuuauaugguugagucuccug

SEQ ID NO: 541424 - RNA, 32 nt, Human
uuggcaccucuguaggcccugccugugccugu

SEQ ID NO: 541425 - RNA, 32 nt, Human
uuggcaccuuacuucccugggauccccagagu

SEQ ID NO: 541426 - RNA, 32 nt, Human
uuggcaccuuguuaaaauuucuagucaucugu

SEQ ID NO: 541427 - RNA, 32 nt, Human
uuggcaccuuuaucaaauauuauuugacuaua

SEQ ID NO: 541428 - RNA, 32 nt, Human
uuggcacgaccuaccccgacacccaacaaagc

SEQ ID NO: 541429 - RNA, 32 nt, Human
uuggcacgcuauguucaggaacugaaacagga

SEQ ID NO: 541430 - RNA, 32 nt, Human
uuggcacgggauuucucagcuucgguggaaga

SEQ ID NO: 541431 - RNA, 32 nt, Human
uuggcacguguuguuuacauuuugcugugaca

SEQ ID NO: 541432 - RNA, 32 nt, Human
uuggcacuaagcuguuguauuaagcaugagag

SEQ ID NO: 541433 - RNA, 32 nt, Human
uuggcacuauuuauguuuuucaguuaaaaaca

SEQ ID NO: 541434 - RNA, 31 nt, Human
uuggcacucaauaaagauuugcagaauuuaa

SEQ ID NO: 541435 - RNA, 32 nt, Human
uuggcacuccacuccuauuuggagggacuuca

SEQ ID NO: 541436 - RNA, 32 nt, Human
uuggcacugaugcuguuuucucuugucugauu

SEQ ID NO: 541437 - RNA, 32 nt, Human
uuggcacugccauguaucucaggcuuggguuc

SEQ ID NO: 541438 - RNA, 32 nt, Human
uuggcacuuccaagcuggcaucuugccccuug

SEQ ID NO: 541439 - RNA, 32 nt, Human
uuggcagaagagugaaagaacuccugccaaga

SEQ ID NO: 541440 - RNA, 32 nt, Human
uuggcagacaggagugagaaagacuggggaag

SEQ ID NO: 541441 - RNA, 32 nt, Human
uuggcagacaguggcaaccucuggaagacaga

SEQ ID NO: 541442 - RNA, 32 nt, Human
uuggcagaggaagagcccuggcauuccagcag

SEQ ID NO: 541443 - RNA, 32 nt, Human
uuggcagaggcagagacauaagacgugcacga

SEQ ID NO: 541444 - RNA, 32 nt, Human
uuggcagaggcagggugucaacuugauuaggu

SEQ ID NO: 541445 - RNA, 32 nt, Human
uuggcagagggagaaauaagccagccacggca

SEQ ID NO: 541446 - RNA, 32 nt, Human
uuggcagauuuuguuggcauuauugaaauaua

SEQ ID NO: 541447 - RNA, 32 nt, Human
uuggcagcacagaacucagcucaaggguucug

SEQ ID NO: 541448 - RNA, 32 nt, Human
uuggcagcagcguccagugcccugccaguagc

SEQ ID NO: 541449 - RNA, 32 nt, Human
uuggcagcagcuaccugccagagauguugaag

SEQ ID NO: 541450 - RNA, 32 nt, Human
uuggcagcaggagcuguccuuuuguugggugc

SEQ ID NO: 541451 - RNA, 32 nt, Human
uuggcagcauucuccccaaaugccugggcacc

SEQ ID NO: 541452 - RNA, 32 nt, Human
uuggcagccaggccuggcucucagcagcucug

SEQ ID NO: 541453 - RNA, 32 nt, Human
uuggcagccauguuggaaaaaucucuuuuggc

SEQ ID NO: 541454 - RNA, 32 nt, Human
uuggcagcccacuccccagccccagccccuuc

SEQ ID NO: 541455 - RNA, 32 nt, Human
uuggcagcccuucacguagccuccugccucgc

SEQ ID NO: 541456 - RNA, 32 nt, Human
uuggcagccugagagcuccaaggaacaagcug

SEQ ID NO: 541457 - RNA, 32 nt, Human
uuggcagccugagcucuggagccagacuucug

SEQ ID NO: 541458 - RNA, 32 nt, Human
uuggcagcucacugaucucuugccucugcuga

SEQ ID NO: 541459 - RNA, 32 nt, Human
uuggcagcugaggaguggaggcugggcagcuc

SEQ ID NO: 541460 - RNA, 32 nt, Human
uuggcagcugccguacuccaggcuugugucgg

SEQ ID NO: 541461 - RNA, 31 nt, Human
uuggcagcugugccagaaaccaaagccaggc

SEQ ID NO: 541462 - RNA, 32 nt, Human
uuggcagcuguguugcugggccuggugcugcu

SEQ ID NO: 541463 - RNA, 32 nt, Human
uuggcaggacacagagagguaggugaacauuc

SEQ ID NO: 541464 - RNA, 21 nt, Human
uuggcaggacuuucugugcca

SEQ ID NO: 541465 - RNA, 32 nt, Human
uuggcaggccgaggcagguggaucaccugacg

SEQ ID NO: 541466 - RNA, 32 nt, Human
uuggcaggccgaggcggguggaucacuugagg

SEQ ID NO: 541467 - RNA, 32 nt, Human
uuggcaggcuaacgcaggagaaucacuugacc

SEQ ID NO: 541468 - RNA, 32 nt, Human
uuggcaggcucacuucugaggugcaaaacaua

SEQ ID NO: 541469 - RNA, 32 nt, Human
uuggcaggcugaagcaggagaauggcgugaac

SEQ ID NO: 541470 - RNA, 32 nt, Human
uuggcaggcugaggcagaagaaucaccugaac

SEQ ID NO: 541471 - RNA, 32 nt, Human
uuggcaggcugaggcaggagaauugcuugaac

SEQ ID NO: 541472 - RNA, 32 nt, Human
uuggcaggcugaggugggagaaucgcuugagc

SEQ ID NO: 541473 - RNA, 32 nt, Human
uuggcaggcuuaguaccaccugcuccucaucu

SEQ ID NO: 541474 - RNA, 32 nt, Human
uuggcagggagacagccuggcccagugacccu

SEQ ID NO: 541475 - RNA, 32 nt, Human
uuggcagggcaggcuuccuggaggaggggcug

SEQ ID NO: 541476 - RNA, 32 nt, Human
uuggcagggccuucaagaggccuguguggggg

SEQ ID NO: 541477 - RNA, 32 nt, Human
uuggcagggcuguccccucuugcuucuccuug

SEQ ID NO: 541478 - RNA, 28 nt, Human
uuggcagggguggcugccucauuuagag

SEQ ID NO: 541479 - RNA, 32 nt, Human
uuggcagguggcagcaggaugguggguguuca

SEQ ID NO: 541480 - RNA, 32 nt, Human
uuggcaggugugagaucgaggccaguagugug

SEQ ID NO: 541481 - RNA, 32 nt, Human
uuggcaggugugagccaucgcgcccggccaac

SEQ ID NO: 541482 - RNA, 32 nt, Human
uuggcaguacagauaacaaaauacacuuuacu

SEQ ID NO: 541483 - RNA, 32 nt, Human
uuggcaguccucccaaucccacaccuccuguu

SEQ ID NO: 541484 - RNA, 32 nt, Human
uuggcagucugcaaccuggaagaggucccuca

SEQ ID NO: 541485 - RNA, 32 nt, Human
uuggcagugggacagauccagggauaggcuac

SEQ ID NO: 541486 - RNA, 32 nt, Human
uuggcaguuguucucuugagcacuuugaauuu

SEQ ID NO: 541487 - RNA, 32 nt, Human
uuggcauagguauguguauacacacggugcac

SEQ ID NO: 541488 - RNA, 32 nt, Human
uuggcauagugauuuuuauuucugggugggau

SEQ ID NO: 541489 - RNA, 32 nt, Human
uuggcauauauacuuggcauuccuguccacca

SEQ ID NO: 541490 - RNA, 32 nt, Human
uuggcaucagucacagucuuccucagaggaac

SEQ ID NO: 541491 - RNA, 32 nt, Human
uuggcaucaucccagggacauccucaaauaca

SEQ ID NO: 541492 - RNA, 32 nt, Human
uuggcaucccaaagugcugggacuacaggccu

SEQ ID NO: 541493 - RNA, 32 nt, Human
uuggcaucccaaagugcugggauuacaagaau

SEQ ID NO: 541494 - RNA, 32 nt, Human
uuggcaucccaaagugcugggauuacagcauc

SEQ ID NO: 541495 - RNA, 32 nt, Human
uuggcaucccaaagugcugggauuacgagcgu

SEQ ID NO: 541496 - RNA, 32 nt, Human
uuggcaucccaaaguguugggauuauaggcac

SEQ ID NO: 541497 - RNA, 32 nt, Human
uuggcaucccuaauagacuggcucccaaggca

SEQ ID NO: 541498 - RNA, 32 nt, Human
uuggcaucccuuccugccguccuugacucuuu

SEQ ID NO: 541499 - RNA, 32 nt, Human
uuggcauccuaaagugcugggauuacaggcgu

SEQ ID NO: 541500 - RNA, 32 nt, Human
uuggcaucuaguccaaacaagacugaagaaug

SEQ ID NO: 541501 - RNA, 32 nt, Human
uuggcaucugcacuccagcccaggacuguggu

SEQ ID NO: 541502 - RNA, 32 nt, Human
uuggcaugagagaacuuggaagccggcuguca

SEQ ID NO: 541503 - RNA, 32 nt, Human
uuggcaugaggagagaaaggaaccugaaguuu

SEQ ID NO: 541504 - RNA, 32 nt, Human
uuggcaugcaucucucccagaggagaucucuc

SEQ ID NO: 541505 - RNA, 32 nt, Human
uuggcaugccauugaaacuaagagcucucaag

SEQ ID NO: 541506 - RNA, 32 nt, Human
uuggcaugcuggcaaaugcuacuccuugcuuu

SEQ ID NO: 541507 - RNA, 25 nt, Human
uuggcauggcugccuugauguaaca

SEQ ID NO: 541508 - RNA, 32 nt, Human
uuggcauucaguuguuaaaaacaaauaggaug

SEQ ID NO: 541509 - RNA, 32 nt, Human
uuggcauucauagauaaacagcucaggcauaa

SEQ ID NO: 541510 - RNA, 32 nt, Human
uuggcauugauuguaauucugccuuuuuggaa

SEQ ID NO: 541511 - RNA, 32 nt, Human
uuggcauugcaaccuccauuucuagcuccugu

SEQ ID NO: 541512 - RNA, 32 nt, Human
uuggcauuggcaccaguguggucaccugcccc

SEQ ID NO: 541513 - RNA, 32 nt, Human
uuggcauuguaccuggguacaggaagccuuug

SEQ ID NO: 541514 - RNA, 32 nt, Human
uuggcauuugaacaaaagacuuacuuacaaag

SEQ ID NO: 541515 - RNA, 32 nt, Human
uuggcauuugcaggucaagcaggaagcaguug

SEQ ID NO: 541516 - RNA, 32 nt, Human
uuggcauuugcaucacugccuucuguucccgg

SEQ ID NO: 541517 - RNA, 32 nt, Human
uuggcauuugcuuaguuggaaaaaggaacacu

SEQ ID NO: 541518 - RNA, 32 nt, Human
uuggccaaaguguugggauuacaggcauaagc

SEQ ID NO: 541519 - RNA, 32 nt, Human
uuggccaacauagugaaaccccaucucuacca

SEQ ID NO: 541520 - RNA, 32 nt, Human
uuggccaacauggagaaaccccaucucuacua

SEQ ID NO: 541521 - RNA, 32 nt, Human
uuggccaacauggcgaaaccccaucgcuacua

SEQ ID NO: 541522 - RNA, 32 nt, Human
uuggccaacauggcgaaaccccaucucuaccg

SEQ ID NO: 541523 - RNA, 32 nt, Human
uuggccaacauggugaaaccccaucuccacaa

SEQ ID NO: 541524 - RNA, 32 nt, Human
uuggccaacauggugaaaccccaucucuacca

SEQ ID NO: 541525 - RNA, 32 nt, Human
uuggccaacauggugaaacccugucucuccua

SEQ ID NO: 541526 - RNA, 32 nt, Human
uuggccaacauggugaaaccucaucucuacua

SEQ ID NO: 541527 - RNA, 32 nt, Human
uuggccaacauggugaaauccugucuguacua

SEQ ID NO: 541528 - RNA, 32 nt, Human
uuggccaacauggugaagcucugucucuacua

SEQ ID NO: 541529 - RNA, 32 nt, Human
uuggccaacauggugagaccccaucucugcua

SEQ ID NO: 541530 - RNA, 32 nt, Human
uuggccaacauggugagcccccgucucuacua

SEQ ID NO: 541531 - RNA, 32 nt, Human
uuggccaacugcacucuggaggcggcggcagc

SEQ ID NO: 541532 - RNA, 32 nt, Human
uuggccaagauggugaaaccccaucucuacua

SEQ ID NO: 541533 - RNA, 32 nt, Human
uuggccaagauggugaaaucccaucucuacaa

SEQ ID NO: 541534 - RNA, 32 nt, Human
uuggccaaguagcugugggcaggcaagcccuu

SEQ ID NO: 541535 - RNA, 20 nt, Human
uuggccacaauagagaugga

SEQ ID NO: 541536 - RNA, 24 nt, Human
uuggccacacaguggcacuggagu

SEQ ID NO: 541537 - RNA, 32 nt, Human
uuggccacagccaggggagcagaggggcagag

SEQ ID NO: 541538 - RNA, 32 nt, Human
uuggccacagcgugggaagcagcucuggggga

SEQ ID NO: 541539 - RNA, 32 nt, Human
uuggccacaguuacagggagagaacaauauca

SEQ ID NO: 541540 - RNA, 32 nt, Human
uuggccacccugcacguugugcacugaccuuu

SEQ ID NO: 541541 - RNA, 32 nt, Human
uuggccacccuugccauuucugcucccagagu

SEQ ID NO: 541542 - RNA, 22 nt, Human
uuggccaccucaugcccauccc

SEQ ID NO: 541543 - RNA, 32 nt, Human
uuggccaccuccaggaaguccaaaucaggauc

SEQ ID NO: 541544 - RNA, 32 nt, Human
uuggccacugcaagcuccaccucccagguuca

SEQ ID NO: 541545 - RNA, 32 nt, Human
uuggccagaaucugaggggagagcccccagag

SEQ ID NO: 541546 - RNA, 32 nt, Human
uuggccagagucaggggacagggagagagcuc

SEQ ID NO: 541547 - RNA, 32 nt, Human
uuggccagagucaggggacagggagggagcuc

SEQ ID NO: 541548 - RNA, 32 nt, Human
uuggccagagugguuugaugguuuuguguuag

SEQ ID NO: 541549 - RNA, 32 nt, Human
uuggccagcacuaguuaggggaggucaggugg

SEQ ID NO: 541550 - RNA, 32 nt, Human
uuggccagcccuggguggaggugggugcaagc

SEQ ID NO: 541551 - RNA, 32 nt, Human
uuggccagcgcuguugagggguccccucugga

SEQ ID NO: 541552 - RNA, 24 nt, Human
uuggccagcguagacagcagcaaa

SEQ ID NO: 541553 - RNA, 32 nt, Human
uuggccagcugguccccgcuacauucaaccaa

SEQ ID NO: 541554 - RNA, 20 nt, Human
uuggccagcuuuucugccag

SEQ ID NO: 541555 - RNA, 32 nt, Human
uuggccaggccucucagaauugagugagcgug

SEQ ID NO: 541556 - RNA, 32 nt, Human
uuggccaggcuggaaugcaguggcacaaucau

SEQ ID NO: 541557 - RNA, 21 nt, Human
uuggccaggcuggagugcagu

SEQ ID NO: 541558 - RNA, 32 nt, Human
uuggccaggcuggagugcaguaaguggcacaa

SEQ ID NO: 541559 - RNA, 32 nt, Human
uuggccaggcugggacucgaacuccugaccuu

SEQ ID NO: 541560 - RNA, 32 nt, Human
uuggccaggcuggucucaaccucuggaccuca

SEQ ID NO: 541561 - RNA, 32 nt, Human
uuggccaggcuggucucgaacuccugagcuca

SEQ ID NO: 541562 - RNA, 32 nt, Human
uuggccaggcuggucucgaacucuggaccuca

SEQ ID NO: 541563 - RNA, 32 nt, Human
uuggccaggcuggucucgaacucuggguucaa

SEQ ID NO: 541564 - RNA, 32 nt, Human
uuggccaggcuggucucgaacuucugaccuca

SEQ ID NO: 541565 - RNA, 32 nt, Human
uuggccaggcuggucucgaacuucugacguca

SEQ ID NO: 541566 - RNA, 32 nt, Human
uuggccaggcuggucucgaagccugagccaua

SEQ ID NO: 541567 - RNA, 32 nt, Human
uuggccaggcuggucucgaaugucugaccuca

SEQ ID NO: 541568 - RNA, 32 nt, Human
uuggccaggcuggucucgaauuccugagcuca

SEQ ID NO: 541569 - RNA, 32 nt, Human
uuggccaggcuggucucgaauuccuggccuca

SEQ ID NO: 541570 - RNA, 32 nt, Human
uuggccaggcuggucuggaacuccugagcuca

SEQ ID NO: 541571 - RNA, 32 nt, Human
uuggccaggcuggucuggaacuccuggccucc

SEQ ID NO: 541572 - RNA, 32 nt, Human
uuggccaggcuggucuuagacuccugaccuca

SEQ ID NO: 541573 - RNA, 32 nt, Human
uuggccaggcuggucuugaacucccagccuga

SEQ ID NO: 541574 - RNA, 32 nt, Human
uuggccaggcuggucuugaacuccugagccug

SEQ ID NO: 541575 - RNA, 32 nt, Human
uuggccaggcuggucuugaacuccugagcuca

SEQ ID NO: 541576 - RNA, 32 nt, Human
uuggccaggcuggucuugaacuucugaccuga

SEQ ID NO: 541577 - RNA, 32 nt, Human
uuggccaggcuggucuugaauuccucagcuca

SEQ ID NO: 541578 - RNA, 32 nt, Human
uuggccaggcuggucuugaauuccugaccuca

SEQ ID NO: 541579 - RNA, 32 nt, Human
uuggccaggcuggucuugaauuccugaccucg

SEQ ID NO: 541580 - RNA, 32 nt, Human
uuggccaggcuggucuugaauucuuggcccca

SEQ ID NO: 541581 - RNA, 32 nt, Human
uuggccaggcuggugugaucauggcucauugc

SEQ ID NO: 541582 - RNA, 32 nt, Human
uuggccagggaggcgcagagacauggggcaag

SEQ ID NO: 541583 - RNA, 32 nt, Human
uuggccagucaccaccaccauccuaugcagcu

SEQ ID NO: 541584 - RNA, 32 nt, Human
uuggccagucuguaggccaacaagaagguucc

SEQ ID NO: 541585 - RNA, 32 nt, Human
uuggccaguggcuguggaggggaccaccugcc

SEQ ID NO: 541586 - RNA, 32 nt, Human
uuggccaguguuuccaggaggcucugggcuuc

SEQ ID NO: 541587 - RNA, 32 nt, Human
uuggccaucuguaugcuagagaggggugagga

SEQ ID NO: 541588 - RNA, 32 nt, Human
uuggccaucuucucgcagagugcucccugcua

SEQ ID NO: 541589 - RNA, 32 nt, Human
uuggccaugcuggucucaaauucugaaagagg

SEQ ID NO: 541590 - RNA, 32 nt, Human
uuggccauggccaagaaaaaggaaaagaaaga

SEQ ID NO: 541591 - RNA, 32 nt, Human
uuggccauucuuuccccuccccuaccccuuuu

SEQ ID NO: 541592 - RNA, 32 nt, Human
uuggccauugcacuccagccugggugacagag

SEQ ID NO: 541593 - RNA, 32 nt, Human
uuggcccaaccacaggcuaaucccaggccaug

SEQ ID NO: 541594 - RNA, 32 nt, Human
uuggcccaacuggcuccaaccuaucuggucaa

SEQ ID NO: 541595 - RNA, 32 nt, Human
uuggcccaacuggggcccuccgcugcuucugg

SEQ ID NO: 541596 - RNA, 32 nt, Human
uuggcccaaggaugccuggggccugccagcug

SEQ ID NO: 541597 - RNA, 32 nt, Human
uuggcccacugcaaccucugccucccggguuc

SEQ ID NO: 541598 - RNA, 32 nt, Human
uuggcccacugcaagcuccgccucccagguuc

SEQ ID NO: 541599 - RNA, 32 nt, Human
uuggcccagcugaaaacggaauucuuugccgg

SEQ ID NO: 541600 - RNA, 32 nt, Human
uuggcccagcuuuuagaaaaugcagucauuuu

SEQ ID NO: 541601 - RNA, 31 nt, Human
uuggcccaggaaagagaaaagguuguauguu

SEQ ID NO: 541602 - RNA, 32 nt, Human
uuggcccaggaggcagagguugcagugagcug

SEQ ID NO: 541603 - RNA, 21 nt, Human
uuggcccaugcagucugcaug

SEQ ID NO: 541604 - RNA, 32 nt, Human
uuggccccagaggcgagggaccaguggaggug

SEQ ID NO: 541605 - RNA, 32 nt, Human
uuggccccagaggggcccucccaugggaagau

SEQ ID NO: 541606 - RNA, 32 nt, Human
uuggccccagggagggcaggaggcucuugacc

SEQ ID NO: 541607 - RNA, 20 nt, Human
uuggcccccacccccuccac

SEQ ID NO: 541608 - RNA, 18 nt, Human
uuggcccccagccccuuc

SEQ ID NO: 541609 - RNA, 23 nt, Human
uuggcccccagcugcgccugaca

SEQ ID NO: 541610 - RNA, 21 nt, Human
uuggcccccaugacccuucca

SEQ ID NO: 541611 - RNA, 22 nt, Human
uuggcccccuacagcagucugg

SEQ ID NO: 541612 - RNA, 32 nt, Human
uuggcccccucccucccuauaaggcuguggaa

SEQ ID NO: 541613 - RNA, 32 nt, Human
uuggcccccugcaaccuccgccucccggguuc

SEQ ID NO: 541614 - RNA, 32 nt, Human
uuggcccccugcccuccucucccucccagaug

SEQ ID NO: 541615 - RNA, 32 nt, Human
uuggccccucucacacagagcugucagcaggg

SEQ ID NO: 541616 - RNA, 32 nt, Human
uuggccccugcccagccgcucucccuguccuc

SEQ ID NO: 541617 - RNA, 17 nt, Human
uuggccccuggggccuu

SEQ ID NO: 541618 - RNA, 32 nt, Human
uuggccccuguggcuggccagauucugcccuu

SEQ ID NO: 541619 - RNA, 32 nt, Human
uuggcccgccugccuccacuccugccuucacc

SEQ ID NO: 541620 - RNA, 32 nt, Human
uuggcccuagaagagaaaguugaagaguccca

SEQ ID NO: 541621 - RNA, 32 nt, Human
uuggcccuccaggcauccccaguuuccagccu

SEQ ID NO: 541622 - RNA, 32 nt, Human
uuggcccucucucugaccucagggccuggcca

SEQ ID NO: 541623 - RNA, 32 nt, Human
uuggcccugaguggccagggaggucaacuuga

SEQ ID NO: 541624 - RNA, 32 nt, Human
uuggcccugagugucuugagacagugggccau

SEQ ID NO: 541625 - RNA, 32 nt, Human
uuggcccugcagcaugucaugcucccagaauu

SEQ ID NO: 541626 - RNA, 32 nt, Human
uuggcccugcagccuccaccucgccgcugggg

SEQ ID NO: 541627 - RNA, 32 nt, Human
uuggcccugccugaugccaagcaaagacccuu

SEQ ID NO: 541628 - RNA, 32 nt, Human
uuggcccugccuggcccagccugcaccccugu

SEQ ID NO: 541629 - RNA, 32 nt, Human
uuggcccugcuauuuauuuuuguauuuauguc

SEQ ID NO: 541630 - RNA, 32 nt, Human
uuggcccuggucccgucugccugcuccucagg

SEQ ID NO: 541631 - RNA, 18 nt, Human
uuggcccuucuccaccca

SEQ ID NO: 541632 - RNA, 32 nt, Human
uuggcccuuuggcucuugcccuuggcucccuu

SEQ ID NO: 541633 - RNA, 32 nt, Human
uuggcccuuuucucacccucuggaguucccac

SEQ ID NO: 541634 - RNA, 31 nt, Human
uuggccgacaacacagagaggagggggagcu

SEQ ID NO: 541635 - RNA, 32 nt, Human
uuggccgacacagauauuccagugcauguggu

SEQ ID NO: 541636 - RNA, 32 nt, Human
uuggccgaugaaguaccugcucagcuuagcua

SEQ ID NO: 541637 - RNA, 32 nt, Human
uuggccgcccacuugauccagaccguacugag

SEQ ID NO: 541638 - RNA, 19 nt, Human
uuggccgccccccucccag

SEQ ID NO: 541639 - RNA, 20 nt, Human
uuggccgccccccucccagg

SEQ ID NO: 541640 - RNA, 32 nt, Human
uuggccgcgacucucugcuucucuccagcucu

SEQ ID NO: 541641 - RNA, 32 nt, Human
uuggccggauguccucagggcuggcagaugca

SEQ ID NO: 541642 - RNA, 32 nt, Human
uuggccggcuaguguuuccucucauuucccuu

SEQ ID NO: 541643 - RNA, 32 nt, Human
uuggccgggccuggccagcagugcacagugcc

SEQ ID NO: 541644 - RNA, 32 nt, Human
uuggccgggcugggcaggugcgccuuccuuuc

SEQ ID NO: 541645 - RNA, 32 nt, Human
uuggccggucuuggcgcugucaccucuuuugg

SEQ ID NO: 541646 - RNA, 32 nt, Human
uuggccgucucaucuugccacuuccaggaggc

SEQ ID NO: 541647 - RNA, 32 nt, Human
uuggccgugcucauggcgcccuccuccugggg

SEQ ID NO: 541648 - RNA, 32 nt, Human
uuggccuaaaaauuaaaagagaucgauauuaa

SEQ ID NO: 541649 - RNA, 32 nt, Human
uuggccuaccugggccagcccccaccaccugg

SEQ ID NO: 541650 - RNA, 32 nt, Human
uuggccuacuuacaaguagugaaaguucccuu

SEQ ID NO: 541651 - RNA, 32 nt, Human
uuggccuagcaugggagccaccacgggaacac

SEQ ID NO: 541652 - RNA, 32 nt, Human
uuggccuaggaguucaagaccagccugggcua

SEQ ID NO: 541653 - RNA, 23 nt, Human
uuggccuauacgguuuucagcua

SEQ ID NO: 541654 - RNA, 32 nt, Human
uuggccuaugaccagucugauugguugcagga

SEQ ID NO: 541655 - RNA, 32 nt, Human
uuggccuaugaucccgugugggccacugguac

SEQ ID NO: 541656 - RNA, 32 nt, Human
uuggccucaaaguauugagauuacaggcauga

SEQ ID NO: 541657 - RNA, 32 nt, Human
uuggccucaaauuaucugcccaccucggccuc

SEQ ID NO: 541658 - RNA, 32 nt, Human
uuggccucaaauucaguuuauuuggugaaaag

SEQ ID NO: 541659 - RNA, 32 nt, Human
uuggccucaagcaauccuccuccagagccucc

SEQ ID NO: 541660 - RNA, 32 nt, Human
uuggccucaagcaauccuuccucuuuggccuc

SEQ ID NO: 541661 - RNA, 32 nt, Human
uuggccucaagggauccucccaccucggcuuc

SEQ ID NO: 541662 - RNA, 32 nt, Human
uuggccucaaguaauccuccugccucagccuc

SEQ ID NO: 541663 - RNA, 32 nt, Human
uuggccucacaaagugcugggauuauaggcaa

SEQ ID NO: 541664 - RNA, 32 nt, Human
uuggccucaggaaaucaaccaaugcugcggaa

SEQ ID NO: 541665 - RNA, 32 nt, Human
uuggccucaggagcugggggugcaguggggga

SEQ ID NO: 541666 - RNA, 32 nt, Human
uuggccuccaaaagugcugggauuacaggcau

SEQ ID NO: 541667 - RNA, 32 nt, Human
uuggccuccacaagugcugggauuacaggugu

SEQ ID NO: 541668 - RNA, 32 nt, Human
uuggccucccaaaauacugggauuacaggggu

SEQ ID NO: 541669 - RNA, 32 nt, Human
uuggccucccaaaauauugggauuacagacau

SEQ ID NO: 541670 - RNA, 32 nt, Human
uuggccucccaaaaugcugagauuacaggugu

SEQ ID NO: 541671 - RNA, 32 nt, Human
uuggccucccaaaaugcugggauuacaggcau

SEQ ID NO: 541672 - RNA, 32 nt, Human
uuggccucccaaaaugcugggauuacaggcgu

SEQ ID NO: 541673 - RNA, 32 nt, Human
uuggccucccaaaaugcugggauuacaggugu

SEQ ID NO: 541674 - RNA, 32 nt, Human
uuggccucccaaaaugcugggauuauaggcau

SEQ ID NO: 541675 - RNA, 32 nt, Human
uuggccucccaaaaugcugggguuacaggcau

SEQ ID NO: 541676 - RNA, 32 nt, Human
uuggccucccaaaauguugggauuacagaugg

SEQ ID NO: 541677 - RNA, 32 nt, Human
uuggccucccaaaauucugggauuacaggcau

SEQ ID NO: 541678 - RNA, 32 nt, Human
uuggccucccaaacugcuggcauuacaggugu

SEQ ID NO: 541679 - RNA, 32 nt, Human
uuggccucccaaacugcugggauuacaggcgu

SEQ ID NO: 541680 - RNA, 32 nt, Human
uuggccucccaaagagcugggauuacaggcau

SEQ ID NO: 541681 - RNA, 32 nt, Human
uuggccucccaaagcacugggauuacaagcau

SEQ ID NO: 541682 - RNA, 32 nt, Human
uuggccucccaaagcacugggauuacaggcau

SEQ ID NO: 541683 - RNA, 32 nt, Human
uuggccucccaaagcgcuaggauuacagaugu

SEQ ID NO: 541684 - RNA, 32 nt, Human
uuggccucccaaagcgcugggauuacaggcau

SEQ ID NO: 541685 - RNA, 32 nt, Human
uuggccucccaaagcgcugggauuacaggugu

SEQ ID NO: 541686 - RNA, 32 nt, Human
uuggccucccaaagcgcugggauuauaggcgu

SEQ ID NO: 541687 - RNA, 32 nt, Human
uuggccucccaaagcgcugggauuauaggucu

SEQ ID NO: 541688 - RNA, 32 nt, Human
uuggccucccaaagcgcugguauuacaggugu

SEQ ID NO: 541689 - RNA, 32 nt, Human
uuggccucccaaagcguugggauuauaggcau

SEQ ID NO: 541690 - RNA, 32 nt, Human
uuggccucccaaagggcugugauuacaggcgu

SEQ ID NO: 541691 - RNA, 32 nt, Human
uuggccucccaaaggguugggauuacaggugu

SEQ ID NO: 541692 - RNA, 32 nt, Human
uuggccucccaaaguacugggauuacaggcau

SEQ ID NO: 541693 - RNA, 32 nt, Human
uuggccucccaaaguacugggauuacaggcgu

SEQ ID NO: 541694 - RNA, 32 nt, Human
uuggccucccaaagugaugggauuacagaugu

SEQ ID NO: 541695 - RNA, 32 nt, Human
uuggccucccaaagugccaggauuacaggcau

SEQ ID NO: 541696 - RNA, 32 nt, Human
uuggccucccaaagugccgggauuacaggcau

SEQ ID NO: 541697 - RNA, 32 nt, Human
uuggccucccaaagugcgggauuacaagcgug

SEQ ID NO: 541698 - RNA, 32 nt, Human
uuggccucccaaagugcuaagauuacaggcau

SEQ ID NO: 541699 - RNA, 32 nt, Human
uuggccucccaaagugcuagauuacaggcgug

SEQ ID NO: 541700 - RNA, 32 nt, Human
uuggccucccaaagugcuaggauuacagaugg

SEQ ID NO: 541701 - RNA, 32 nt, Human
uuggccucccaaagugcuaggauuacaggcau

SEQ ID NO: 541702 - RNA, 32 nt, Human
uuggccucccaaagugcuaggauuacaggcug

SEQ ID NO: 541703 - RNA, 32 nt, Human
uuggccucccaaagugcuaggauuacagguau

SEQ ID NO: 541704 - RNA, 32 nt, Human
uuggccucccaaagugcuaggauuacaggugu

SEQ ID NO: 541705 - RNA, 32 nt, Human
uuggccucccaaagugcugagauuacagaugu

SEQ ID NO: 541706 - RNA, 32 nt, Human
uuggccucccaaagugcugagauuacaggcau

SEQ ID NO: 541707 - RNA, 32 nt, Human
uuggccucccaaagugcugagauuacaggcgu

SEQ ID NO: 541708 - RNA, 32 nt, Human
uuggccucccaaagugcugagauuacaggugu

SEQ ID NO: 541709 - RNA, 32 nt, Human
uuggccucccaaagugcugagauuauaggcau

SEQ ID NO: 541710 - RNA, 32 nt, Human
uuggccucccaaagugcugagauugcagaugu

SEQ ID NO: 541711 - RNA, 32 nt, Human
uuggccucccaaagugcugcgauuacaggcgu

SEQ ID NO: 541712 - RNA, 32 nt, Human
uuggccucccaaagugcuggaauuacaggcau

SEQ ID NO: 541713 - RNA, 32 nt, Human
uuggccucccaaagugcuggaauugcagacgu

SEQ ID NO: 541714 - RNA, 32 nt, Human
uuggccucccaaagugcuggauuacaggcaua

SEQ ID NO: 541715 - RNA, 32 nt, Human
uuggccucccaaagugcuggcauuacaggcgu

SEQ ID NO: 541716 - RNA, 32 nt, Human
uuggccucccaaagugcuggcauuacagguau

SEQ ID NO: 541717 - RNA, 32 nt, Human
uuggccucccaaagugcuggcauuacaggugu

SEQ ID NO: 541718 - RNA, 32 nt, Human
uuggccucccaaagugcugggacgugacagga

SEQ ID NO: 541719 - RNA, 32 nt, Human
uuggccucccaaagugcugggacuacaggugc

SEQ ID NO: 541720 - RNA, 32 nt, Human
uuggccucccaaagugcugggagccacugcuc

SEQ ID NO: 541721 - RNA, 32 nt, Human
uuggccucccaaagugcugggaucacaggcau

SEQ ID NO: 541722 - RNA, 32 nt, Human
uuggccucccaaagugcugggaucacaggcgu

SEQ ID NO: 541723 - RNA, 32 nt, Human
uuggccucccaaagugcugggauuacaagcgu

SEQ ID NO: 541724 - RNA, 32 nt, Human
uuggccucccaaagugcugggauuacagacau

SEQ ID NO: 541725 - RNA, 32 nt, Human
uuggccucccaaagugcugggauuacagacgu

SEQ ID NO: 541726 - RNA, 32 nt, Human
uuggccucccaaagugcugggauuacagaugu

SEQ ID NO: 541727 - RNA, 32 nt, Human
uuggccucccaaagugcugggauuacagccac

SEQ ID NO: 541728 - RNA, 32 nt, Human
uuggccucccaaagugcugggauuacagccgu

SEQ ID NO: 541729 - RNA, 32 nt, Human
uuggccucccaaagugcugggauuacagcugu

SEQ ID NO: 541730 - RNA, 32 nt, Human
uuggccucccaaagugcugggauuacaggagu

SEQ ID NO: 541731 - RNA, 32 nt, Human
uuggccucccaaagugcugggauuacaggcau

SEQ ID NO: 541732 - RNA, 32 nt, Human
uuggccucccaaagugcugggauuacaggccu

SEQ ID NO: 541733 - RNA, 32 nt, Human
uuggccucccaaagugcugggauuacaggcgc

SEQ ID NO: 541734 - RNA, 32 nt, Human
uuggccucccaaagugcugggauuacaggcgg

SEQ ID NO: 541735 - RNA, 32 nt, Human
uuggccucccaaagugcugggauuacaggcgu

SEQ ID NO: 541736 - RNA, 32 nt, Human
uuggccucccaaagugcugggauuacagggau

SEQ ID NO: 541737 - RNA, 32 nt, Human
uuggccucccaaagugcugggauuacagggca

SEQ ID NO: 541738 - RNA, 32 nt, Human
uuggccucccaaagugcugggauuacagggga

SEQ ID NO: 541739 - RNA, 32 nt, Human
uuggccucccaaagugcugggauuacagguac

SEQ ID NO: 541740 - RNA, 32 nt, Human
uuggccucccaaagugcugggauuacaggugu

SEQ ID NO: 541741 - RNA, 32 nt, Human
uuggccucccaaagugcugggauuaccagcau

SEQ ID NO: 541742 - RNA, 32 nt, Human
uuggccucccaaagugcugggauuacgggcau

SEQ ID NO: 541743 - RNA, 32 nt, Human
uuggccucccaaagugcugggauuacuggcau

SEQ ID NO: 541744 - RNA, 32 nt, Human
uuggccucccaaagugcugggauuacugguau

SEQ ID NO: 541745 - RNA, 32 nt, Human
uuggccucccaaagugcugggauuagaagcgu

SEQ ID NO: 541746 - RNA, 32 nt, Human
uuggccucccaaagugcugggauuagaggcau

SEQ ID NO: 541747 - RNA, 32 nt, Human
uuggccucccaaagugcugggauuagaggcgu

SEQ ID NO: 541748 - RNA, 32 nt, Human
uuggccucccaaagugcugggauuauaggagu

SEQ ID NO: 541749 - RNA, 32 nt, Human
uuggccucccaaagugcugggauuauaggcac

SEQ ID NO: 541750 - RNA, 32 nt, Human
uuggccucccaaagugcugggauuauaggcau

SEQ ID NO: 541751 - RNA, 32 nt, Human
uuggccucccaaagugcugggauuauaggcgu

SEQ ID NO: 541752 - RNA, 32 nt, Human
uuggccucccaaagugcugggauuauaggugu

SEQ ID NO: 541753 - RNA, 32 nt, Human
uuggccucccaaagugcugggauuaucaauau

SEQ ID NO: 541754 - RNA, 32 nt, Human
uuggccucccaaagugcugggauuauggacgu

SEQ ID NO: 541755 - RNA, 32 nt, Human
uuggccucccaaagugcugggauuccaggcgu

SEQ ID NO: 541756 - RNA, 32 nt, Human
uuggccucccaaagugcugggauucccggcgu

SEQ ID NO: 541757 - RNA, 32 nt, Human
uuggccucccaaagugcugggauugcagccgu

SEQ ID NO: 541758 - RNA, 32 nt, Human
uuggccucccaaagugcugggauugcaggugu

SEQ ID NO: 541759 - RNA, 32 nt, Human
uuggccucccaaagugcugggauuucaggcgu

SEQ ID NO: 541760 - RNA, 32 nt, Human
uuggccucccaaagugcugggguuaugggugu

SEQ ID NO: 541761 - RNA, 32 nt, Human
uuggccucccaaagugcuggguuacaagcgug

SEQ ID NO: 541762 - RNA, 32 nt, Human
uuggccucccaaagugcugugauuacaggugu

SEQ ID NO: 541763 - RNA, 32 nt, Human
uuggccucccaaaguguuaggauuacaggcau

SEQ ID NO: 541764 - RNA, 32 nt, Human
uuggccucccaaaguguuaggauuacaggcgu

SEQ ID NO: 541765 - RNA, 32 nt, Human
uuggccucccaaaguguuggauuacaggugug

SEQ ID NO: 541766 - RNA, 32 nt, Human
uuggccucccaaaguguugggauuacaggcaa

SEQ ID NO: 541767 - RNA, 32 nt, Human
uuggccucccaaaguguugggauuacaggcau

SEQ ID NO: 541768 - RNA, 32 nt, Human
uuggccucccaaaguguugggauuacaggcgu

SEQ ID NO: 541769 - RNA, 32 nt, Human
uuggccucccaaaguguugggauuacaugcau

SEQ ID NO: 541770 - RNA, 32 nt, Human
uuggccucccaaaguguugggauuauaggcau

SEQ ID NO: 541771 - RNA, 32 nt, Human
uuggccucccaaaguguugggauuauaggcgu

SEQ ID NO: 541772 - RNA, 32 nt, Human
uuggccucccaaaguucugggauuacaggcgu

SEQ ID NO: 541773 - RNA, 32 nt, Human
uuggccucccaaaguucugggauuacagguau

SEQ ID NO: 541774 - RNA, 32 nt, Human
uuggccucccaaaguucugggauuacauuuuu

SEQ ID NO: 541775 - RNA, 32 nt, Human
uuggccucccaaaguuuugggauuacaagugu

SEQ ID NO: 541776 - RNA, 32 nt, Human
uuggccucccaaaugcugggauuacagacaug

SEQ ID NO: 541777 - RNA, 32 nt, Human
uuggccucccaaauugcugggauuacaggugu

SEQ ID NO: 541778 - RNA, 32 nt, Human
uuggccucccaaauuguugggauuauaggcgu

SEQ ID NO: 541779 - RNA, 32 nt, Human
uuggccucccaacaugcugggauuacaggcgu

SEQ ID NO: 541780 - RNA, 32 nt, Human
uuggccucccaacauguugggauuacagaugg

SEQ ID NO: 541781 - RNA, 32 nt, Human
uuggccucccaacgugcugggauuauaggcgu

SEQ ID NO: 541782 - RNA, 32 nt, Human
uuggccucccaacuuguugggauuacagaugg

SEQ ID NO: 541783 - RNA, 32 nt, Human
uuggccucccaaggugcugggacuacaggcgu

SEQ ID NO: 541784 - RNA, 32 nt, Human
uuggccucccaaggugcugggauuacaggcau

SEQ ID NO: 541785 - RNA, 32 nt, Human
uuggccucccaaguagcugggauuacaggugu

SEQ ID NO: 541786 - RNA, 32 nt, Human
uuggccucccaaguugcugggauuacugacac

SEQ ID NO: 541787 - RNA, 32 nt, Human
uuggccucccacagugcugggauuacaggagu

SEQ ID NO: 541788 - RNA, 32 nt, Human
uuggccucccagaguauugggauuacagacau

SEQ ID NO: 541789 - RNA, 32 nt, Human
uuggccucccagagugcugggauuacaggcgu

SEQ ID NO: 541790 - RNA, 32 nt, Human
uuggccucccagagugcugggauuacaggggg

SEQ ID NO: 541791 - RNA, 32 nt, Human
uuggccucccagagugcugggauuacaggugu

SEQ ID NO: 541792 - RNA, 32 nt, Human
uuggccucccagagugcugggauuagucguca

SEQ ID NO: 541793 - RNA, 32 nt, Human
uuggccucccagauugcuggguuuacaggcau

SEQ ID NO: 541794 - RNA, 32 nt, Human
uuggccucccaggacaucuggccugaggggau

SEQ ID NO: 541795 - RNA, 32 nt, Human
uuggccucccauagugcugggauuacaggcau

SEQ ID NO: 541796 - RNA, 32 nt, Human
uuggccucccgaagugcugggauuacagaagu

SEQ ID NO: 541797 - RNA, 32 nt, Human
uuggccucccgaagugcugggauuacaggcau

SEQ ID NO: 541798 - RNA, 32 nt, Human
uuggccucccgaagugcugggauuacaggcgu

SEQ ID NO: 541799 - RNA, 32 nt, Human
uuggccucccgaagugcugggauugcaggcau

SEQ ID NO: 541800 - RNA, 32 nt, Human
uuggccuccgaaagugcugggauuacaggcgu

SEQ ID NO: 541801 - RNA, 32 nt, Human
uuggccuccuaaagugcugggauaacaggcgu

SEQ ID NO: 541802 - RNA, 32 nt, Human
uuggccuccuaaagugcugggaucacaggcgu

SEQ ID NO: 541803 - RNA, 32 nt, Human
uuggccuccuaaagugcugggauuacaggcgu

SEQ ID NO: 541804 - RNA, 32 nt, Human
uuggccuccuaaagugcugggauuacaugagc

SEQ ID NO: 541805 - RNA, 32 nt, Human
uuggccuccuagagugcugggauuacaggugu

SEQ ID NO: 541806 - RNA, 32 nt, Human
uuggccuccuagggugcugggauugcaggccu

SEQ ID NO: 541807 - RNA, 32 nt, Human
uuggccuccugaagugcugggauuacaggcau

SEQ ID NO: 541808 - RNA, 32 nt, Human
uuggccuccuggcugcuuucuccccuuccccc

SEQ ID NO: 541809 - RNA, 32 nt, Human
uuggccuccuuggggaggauggggagguagcc

SEQ ID NO: 541810 - RNA, 32 nt, Human
uuggccucgcagaaaacucucggauggcaaca

SEQ ID NO: 541811 - RNA, 32 nt, Human
uuggccucucaaagugcugggauuacaggcgu

SEQ ID NO: 541812 - RNA, 32 nt, Human
uuggccucucaaagugcugggauuacaggugu

SEQ ID NO: 541813 - RNA, 32 nt, Human
uuggccucucaaagugcugggauuacgggcgu

SEQ ID NO: 541814 - RNA, 32 nt, Human
uuggccucucaaagugcugggauuauaggcau

SEQ ID NO: 541815 - RNA, 32 nt, Human
uuggccucucccaggcuccucuucugcagugc

SEQ ID NO: 541816 - RNA, 32 nt, Human
uuggccucucgaagugcugggauuccaggcgu

SEQ ID NO: 541817 - RNA, 32 nt, Human
uuggccucucuaaaugcugggauugcaggcgu

SEQ ID NO: 541818 - RNA, 32 nt, Human
uuggccucucugagggucucucugugcaucuu

SEQ ID NO: 541819 - RNA, 32 nt, Human
uuggccucugcugccucucagucaccaaguca

SEQ ID NO: 541820 - RNA, 32 nt, Human
uuggccucuguggaucuguaucaguuccaaaa

SEQ ID NO: 541821 - RNA, 32 nt, Human
uuggccucuuccucaccaucuacaacagcaga

SEQ ID NO: 541822 - RNA, 32 nt, Human
uuggccugacaacagucuucugcccaugucug

SEQ ID NO: 541823 - RNA, 32 nt, Human
uuggccugacccauccccuugugagaccucac

SEQ ID NO: 541824 - RNA, 32 nt, Human
uuggccugagccaccagauuaugauguugcca

SEQ ID NO: 541825 - RNA, 31 nt, Human
uuggccugagccucucucccugugucucugu

SEQ ID NO: 541826 - RNA, 32 nt, Human
uuggccugcaaacacauuuacuucuccucuua

SEQ ID NO: 541827 - RNA, 32 nt, Human
uuggccugcaggcaaaugcuguaccuucaguu

SEQ ID NO: 541828 - RNA, 32 nt, Human
uuggccugccuggcuggggaggucaguaaacu

SEQ ID NO: 541829 - RNA, 32 nt, Human
uuggccugcuccaguguuuccuucagagagaa

SEQ ID NO: 541830 - RNA, 32 nt, Human
uuggccuggaggugggguugggauugggggcu

SEQ ID NO: 541831 - RNA, 32 nt, Human
uuggccugggagguccaggcugcaaugagcca

SEQ ID NO: 541832 - RNA, 32 nt, Human
uuggccugggaguuuccugcagccaggccagc

SEQ ID NO: 541833 - RNA, 22 nt, Human
uuggccugggugguagaggaga

SEQ ID NO: 541834 - RNA, 20 nt, Human
uuggccugucaacccaccca

SEQ ID NO: 541835 - RNA, 32 nt, Human
uuggccugugaacagcuggcccagaggaaggg

SEQ ID NO: 541836 - RNA, 32 nt, Human
uuggccuguuccaccaagugagagaagguacu

SEQ ID NO: 541837 - RNA, 32 nt, Human
uuggccuuaaggguaaaaaguacaauauacac

SEQ ID NO: 541838 - RNA, 32 nt, Human
uuggccuuaccaaagcaaaagagggugcaaga

SEQ ID NO: 541839 - RNA, 32 nt, Human
uuggccuuccaaaaugcugcgauuauauaggc

SEQ ID NO: 541840 - RNA, 32 nt, Human
uuggccuuccaaagugcugggauuacaggcau

SEQ ID NO: 541841 - RNA, 32 nt, Human
uuggccuuccaaagugcugggauuacaggcgu

SEQ ID NO: 541842 - RNA, 32 nt, Human
uuggccuuccaaagugcugggauuacaggugu

SEQ ID NO: 541843 - RNA, 32 nt, Human
uuggccuuccaaaguguugggauuacaggcau

SEQ ID NO: 541844 - RNA, 32 nt, Human
uuggccuuccaaaguguugggauuacaggcgu

SEQ ID NO: 541845 - RNA, 32 nt, Human
uuggccuuccaaaguguugggauuaugggcgu

SEQ ID NO: 541846 - RNA, 32 nt, Human
uuggccuuccaaaucacugggauuauaggcau

SEQ ID NO: 541847 - RNA, 32 nt, Human
uuggccuuccagagugcugggauuacaggcgu

SEQ ID NO: 541848 - RNA, 32 nt, Human
uuggccuuccucuccuucccucccucuuccuc

SEQ ID NO: 541849 - RNA, 32 nt, Human
uuggccuuccuugaccacuccauuuaauucuc

SEQ ID NO: 541850 - RNA, 32 nt, Human
uuggccuucuaaagugcugggauuacaggcgu

SEQ ID NO: 541851 - RNA, 32 nt, Human
uuggccuucucgggacuguccugucaccccuc

SEQ ID NO: 541852 - RNA, 25 nt, Human
uuggccuugccuccccuuccugcca

SEQ ID NO: 541853 - RNA, 32 nt, Human
uuggccuugggaauaguuggcugccaaucucc

SEQ ID NO: 541854 - RNA, 32 nt, Human
uuggccuugguugggcucugccaaagacuaau

SEQ ID NO: 541855 - RNA, 32 nt, Human
uuggccuuguaaaauacaacucucauuuaaua

SEQ ID NO: 541856 - RNA, 32 nt, Human
uuggccuuucaaagugcugggauuacaggcau

SEQ ID NO: 541857 - RNA, 32 nt, Human
uuggccuuuucagcuuucuucuugcccagcuc

SEQ ID NO: 541858 - RNA, 25 nt, Human
uuggcgacgggucuugcaugugaca

SEQ ID NO: 541859 - RNA, 32 nt, Human
uuggcgcaauccauguagcagugacccaggcu

SEQ ID NO: 541860 - RNA, 32 nt, Human
uuggcgcagcccugaagaaacuaccuaggaga

SEQ ID NO: 541861 - RNA, 32 nt, Human
uuggcgcauagaggagagaaggaaaccugagg

SEQ ID NO: 541862 - RNA, 32 nt, Human
uuggcgcauucccacacuccagucuggaucca

SEQ ID NO: 541863 - RNA, 32 nt, Human
uuggcgccaagacugcaucuagaaucgcucaa

SEQ ID NO: 541864 - RNA, 23 nt, Human
uuggcgccacagucacuuuucca

SEQ ID NO: 541865 - RNA, 32 nt, Human
uuggcgccccaugggcccucagcgucucccca

SEQ ID NO: 541866 - RNA, 18 nt, Human
uuggcgccuccuaccucc

SEQ ID NO: 541867 - RNA, 32 nt, Human
uuggcgccuguaaucccagcuacucgggaggc

SEQ ID NO: 541868 - RNA, 32 nt, Human
uuggcgcgaacuuguuugauauuugaaguguc

SEQ ID NO: 541869 - RNA, 32 nt, Human
uuggcgcucucucuuuucugcaugucaaguuc

SEQ ID NO: 541870 - RNA, 32 nt, Human
uuggcgcugccacgucugggccgcgguuccca

SEQ ID NO: 541871 - RNA, 20 nt, Human
uuggcgcugccugggguccu

SEQ ID NO: 541872 - RNA, 32 nt, Human
uuggcgcugucucucccccucggcucggagag

SEQ ID NO: 541873 - RNA, 32 nt, Human
uuggcgcuugccaacugggaaguauuuaggga

SEQ ID NO: 541874 - RNA, 32 nt, Human
uuggcggagacaggguuucaccauguuggcca

SEQ ID NO: 541875 - RNA, 32 nt, Human
uuggcggagcauggcccaggaggaggguggga

SEQ ID NO: 541876 - RNA, 32 nt, Human
uuggcggagggugguuuggaagaauggcgagg

SEQ ID NO: 541877 - RNA, 32 nt, Human
uuggcggcagcuggccccagacuucugucuuu

SEQ ID NO: 541878 - RNA, 23 nt, Human
uuggcggcuuagaucuccaaaug

SEQ ID NO: 541879 - RNA, 32 nt, Human
uuggcgggaagagaccaagggugcggcggcuc

SEQ ID NO: 541880 - RNA, 32 nt, Human
uuggcgggagacgggaaggcagcgggcugcgu

SEQ ID NO: 541881 - RNA, 32 nt, Human
uuggcgggguuuccucaucuccccagccugaa

SEQ ID NO: 541882 - RNA, 18 nt, Human
uuggcggguggggugcag

SEQ ID NO: 541883 - RNA, 32 nt, Human
uuggcggguggggugcagggagggagaggcag

SEQ ID NO: 541884 - RNA, 21 nt, Human
uuggcguacuucuggggccuu

SEQ ID NO: 541885 - RNA, 32 nt, Human
uuggcgucagaaguccuuaccucuuuauauug

SEQ ID NO: 541886 - RNA, 32 nt, Human
uuggcgucgggugggaggggaaaacgcaucuu

SEQ ID NO: 541887 - RNA, 32 nt, Human
uuggcgucuccgcugcuuuaccaggaaggaug

SEQ ID NO: 541888 - RNA, 32 nt, Human
uuggcgucuuccuacgucccagaagcagcccc

SEQ ID NO: 541889 - RNA, 32 nt, Human
uuggcguggagcaggcgguggggagagaugga

SEQ ID NO: 541890 - RNA, 32 nt, Human
uuggcguucccaaguuucuccuugguccuccu

SEQ ID NO: 541891 - RNA, 32 nt, Human
uuggcguuuggcucugugcucucuggccaggu

SEQ ID NO: 541892 - RNA, 32 nt, Human
uuggcuaaacaacaugcaucucauuucuucuu

SEQ ID NO: 541893 - RNA, 32 nt, Human
uuggcuaaaggaugacauugcugguuauuugu

SEQ ID NO: 541894 - RNA, 32 nt, Human
uuggcuaacaaggugaaaccccgucucuacua

SEQ ID NO: 541895 - RNA, 32 nt, Human
uuggcuaacacagugaaaccccgucucuacua

SEQ ID NO: 541896 - RNA, 32 nt, Human
uuggcuaacagggugaaaccccgucucuacua

SEQ ID NO: 541897 - RNA, 32 nt, Human
uuggcuaacauggugaaacccuaucucuacua

SEQ ID NO: 541898 - RNA, 32 nt, Human
uuggcuaacauggugaaacccugucucuacua

SEQ ID NO: 541899 - RNA, 32 nt, Human
uuggcuaacugcaaccuccagcuccuggguuc

SEQ ID NO: 541900 - RNA, 32 nt, Human
uuggcuaacugcaaccuccgccucccagguuc

SEQ ID NO: 541901 - RNA, 32 nt, Human
uuggcuaacuuccagacuaugggaaaauaaau

SEQ ID NO: 541902 - RNA, 32 nt, Human
uuggcuaagaauugugucguuguggggugggc

SEQ ID NO: 541903 - RNA, 32 nt, Human
uuggcuaauauggugaaaccccaucucuacua

SEQ ID NO: 541904 - RNA, 32 nt, Human
uuggcuaauucuucuccuccuucacaucagaa

SEQ ID NO: 541905 - RNA, 32 nt, Human
uuggcuaauuuugucaagcacagcuguggugg

SEQ ID NO: 541906 - RNA, 32 nt, Human
uuggcuacacacaaaccaguaucgcucauaga

SEQ ID NO: 541907 - RNA, 32 nt, Human
uuggcuacacagggauguacaaggcgauccca

SEQ ID NO: 541908 - RNA, 32 nt, Human
uuggcuacagcagaccaaacagcccagcagcc

SEQ ID NO: 541909 - RNA, 21 nt, Human
uuggcuaccuccaccccucca

SEQ ID NO: 541910 - RNA, 32 nt, Human
uuggcuacucuuccucgucucagcagagcuca

SEQ ID NO: 541911 - RNA, 32 nt, Human
uuggcuagaaaaucaccagucuuuucucauua

SEQ ID NO: 541912 - RNA, 32 nt, Human
uuggcuagagccucauaaaagaccccagguuu

SEQ ID NO: 541913 - RNA, 32 nt, Human
uuggcuaggcuggaguaaaauggugcgaucuc

SEQ ID NO: 541914 - RNA, 32 nt, Human
uuggcuaggcuggucuugaacuccugagccuc

SEQ ID NO: 541915 - RNA, 32 nt, Human
uuggcuaggggaucacacgccccacauucugg

SEQ ID NO: 541916 - RNA, 32 nt, Human
uuggcuauccugggccccuggcuuucguuuuu

SEQ ID NO: 541917 - RNA, 32 nt, Human
uuggcuauggguggagggugaguuugaagagg

SEQ ID NO: 541918 - RNA, 32 nt, Human
uuggcuauggugaguaauacugcuauggauau

SEQ ID NO: 541919 - RNA, 32 nt, Human
uuggcuauuagucauuuuggcagcuugggcua

SEQ ID NO: 541920 - RNA, 32 nt, Human
uuggcuauugugaaaaacgaugcuauaaaugu

SEQ ID NO: 541921 - RNA, 32 nt, Human
uuggcuauuucucguucuuucugcacuguuuc

SEQ ID NO: 541922 - RNA, 32 nt, Human
uuggcucaaugcaaccuccaccucccagguuc

SEQ ID NO: 541923 - RNA, 32 nt, Human
uuggcucacaacugcaaccuccgucucccggg

SEQ ID NO: 541924 - RNA, 32 nt, Human
uuggcucacacagugcccuuccaauuuguauu

SEQ ID NO: 541925 - RNA, 32 nt, Human
uuggcucaccacaaccuccaccucccagguuc

SEQ ID NO: 541926 - RNA, 32 nt, Human
uuggcucaccacaaccuccgccucccggauuc

SEQ ID NO: 541927 - RNA, 32 nt, Human
uuggcucaccgcaaccuccgccucccagguuc

SEQ ID NO: 541928 - RNA, 32 nt, Human
uuggcucaccgcaaccuccgccucccggguuc

SEQ ID NO: 541929 - RNA, 32 nt, Human
uuggcucaccgcaaccucugccuaccggguuc

SEQ ID NO: 541930 - RNA, 32 nt, Human
uuggcucaccuuucucuccucagcagaacaug

SEQ ID NO: 541931 - RNA, 32 nt, Human
uuggcucacuacaaccuccaccucccagguuc

SEQ ID NO: 541932 - RNA, 32 nt, Human
uuggcucacuacaaccuccaccucccggguuc

SEQ ID NO: 541933 - RNA, 32 nt, Human
uuggcucacuacaaccuccaccuuccaggcuu

SEQ ID NO: 541934 - RNA, 32 nt, Human
uuggcucacuacaaccuccgccucccagguuc

SEQ ID NO: 541935 - RNA, 32 nt, Human
uuggcucacuauagccuugaccucucaggcuc

SEQ ID NO: 541936 - RNA, 32 nt, Human
uuggcucacuccaaccuccaccuuccagguuc

SEQ ID NO: 541937 - RNA, 32 nt, Human
uuggcucacuccaaccuccuccuggguuccag

SEQ ID NO: 541938 - RNA, 32 nt, Human
uuggcucacugcaaacccgccucccagguuua

SEQ ID NO: 541939 - RNA, 32 nt, Human
uuggcucacugcaaacuccgccuuccagguuc

SEQ ID NO: 541940 - RNA, 32 nt, Human
uuggcucacugcaaacucugccuaccagguuc

SEQ ID NO: 541941 - RNA, 32 nt, Human
uuggcucacugcaacauccgccucccggguuc

SEQ ID NO: 541942 - RNA, 32 nt, Human
uuggcucacugcaaccacugucucccggguuc

SEQ ID NO: 541943 - RNA, 32 nt, Human
uuggcucacugcaacccccaccucccggguuc

SEQ ID NO: 541944 - RNA, 32 nt, Human
uuggcucacugcaacccccgccuccaggguuc

SEQ ID NO: 541945 - RNA, 32 nt, Human
uuggcucacugcaaccccgccucccagguuca

SEQ ID NO: 541946 - RNA, 32 nt, Human
uuggcucacugcaacccucccucccggguucc

SEQ ID NO: 541947 - RNA, 32 nt, Human
uuggcucacugcaaccucagccucccagguuc

SEQ ID NO: 541948 - RNA, 32 nt, Human
uuggcucacugcaaccuccaccuccagguuca

SEQ ID NO: 541949 - RNA, 32 nt, Human
uuggcucacugcaaccuccaccucccaggucc

SEQ ID NO: 541950 - RNA, 32 nt, Human
uuggcucacugcaaccuccaccucccagguuc

SEQ ID NO: 541951 - RNA, 32 nt, Human
uuggcucacugcaaccuccaccucccaguuca

SEQ ID NO: 541952 - RNA, 32 nt, Human
uuggcucacugcaaccuccaccucccggguuc

SEQ ID NO: 541953 - RNA, 32 nt, Human
uuggcucacugcaaccuccaccuccugggcuc

SEQ ID NO: 541954 - RNA, 32 nt, Human
uuggcucacugcaaccuccaccuccuggguca

SEQ ID NO: 541955 - RNA, 32 nt, Human
uuggcucacugcaaccuccaccuccuggguuc

SEQ ID NO: 541956 - RNA, 32 nt, Human
uuggcucacugcaaccuccaccucugggauuc

SEQ ID NO: 541957 - RNA, 32 nt, Human
uuggcucacugcaaccuccaccuuccugguuc

SEQ ID NO: 541958 - RNA, 32 nt, Human
uuggcucacugcaaccuccacuucccagguuc

SEQ ID NO: 541959 - RNA, 32 nt, Human
uuggcucacugcaaccuccacuucccggguuc

SEQ ID NO: 541960 - RNA, 32 nt, Human
uuggcucacugcaaccuccacuuccuggguuc

SEQ ID NO: 541961 - RNA, 32 nt, Human
uuggcucacugcaaccuccacuucucagguuc

SEQ ID NO: 541962 - RNA, 32 nt, Human
uuggcucacugcaaccuccaggccagccucag

SEQ ID NO: 541963 - RNA, 32 nt, Human
uuggcucacugcaaccuccaucuccggggcuc

SEQ ID NO: 541964 - RNA, 32 nt, Human
uuggcucacugcaaccuccgacucccagguuc

SEQ ID NO: 541965 - RNA, 32 nt, Human
uuggcucacugcaaccuccgccuccagggcgc

SEQ ID NO: 541966 - RNA, 32 nt, Human
uuggcucacugcaaccuccgccuccaggguuc

SEQ ID NO: 541967 - RNA, 32 nt, Human
uuggcucacugcaaccuccgccucccagguuc

SEQ ID NO: 541968 - RNA, 32 nt, Human
uuggcucacugcaaccuccgccucccgaguuc

SEQ ID NO: 541969 - RNA, 32 nt, Human
uuggcucacugcaaccuccgccucccggguuc

SEQ ID NO: 541970 - RNA, 32 nt, Human
uuggcucacugcaaccuccgccucccugguuc

SEQ ID NO: 541971 - RNA, 32 nt, Human
uuggcucacugcaaccuccgccuccgggguuc

SEQ ID NO: 541972 - RNA, 32 nt, Human
uuggcucacugcaaccuccgccuccuggguua

SEQ ID NO: 541973 - RNA, 32 nt, Human
uuggcucacugcaaccuccgccuccuggguuc

SEQ ID NO: 541974 - RNA, 32 nt, Human
uuggcucacugcaaccuccgccucucagguuc

SEQ ID NO: 541975 - RNA, 32 nt, Human
uuggcucacugcaaccuccgccucucggguuc

SEQ ID NO: 541976 - RNA, 32 nt, Human
uuggcucacugcaaccuccgccucuuggguuc

SEQ ID NO: 541977 - RNA, 32 nt, Human
uuggcucacugcaaccuccgccuuccugguuc

SEQ ID NO: 541978 - RNA, 32 nt, Human
uuggcucacugcaaccuccgccuucuggguuc

SEQ ID NO: 541979 - RNA, 32 nt, Human
uuggcucacugcaaccuccgucucccagguuc

SEQ ID NO: 541980 - RNA, 32 nt, Human
uuggcucacugcaaccuccgucuuccggguuc

SEQ ID NO: 541981 - RNA, 32 nt, Human
uuggcucacugcaaccuccuccucccggguuc

SEQ ID NO: 541982 - RNA, 32 nt, Human
uuggcucacugcaaccucuaccuccuggguuc

SEQ ID NO: 541983 - RNA, 32 nt, Human
uuggcucacugcaaccucugcccccuggguuc

SEQ ID NO: 541984 - RNA, 32 nt, Human
uuggcucacugcaaccucugccuaccggauuc

SEQ ID NO: 541985 - RNA, 32 nt, Human
uuggcucacugcaaccucugccucacaggcuc

SEQ ID NO: 541986 - RNA, 32 nt, Human
uuggcucacugcaaccucugccucacagguuc

SEQ ID NO: 541987 - RNA, 32 nt, Human
uuggcucacugcaaccucugccucccagguuc

SEQ ID NO: 541988 - RNA, 32 nt, Human
uuggcucacugcaaccucugccucccgggcuc

SEQ ID NO: 541989 - RNA, 32 nt, Human
uuggcucacugcaaccucugccucccggguuc

SEQ ID NO: 541990 - RNA, 27 nt, Human
uuggcucacugcaaccucugccuccug

SEQ ID NO: 541991 - RNA, 32 nt, Human
uuggcucacugcaaccucugccuucuggguuc

SEQ ID NO: 541992 - RNA, 32 nt, Human
uuggcucacugcaaccucugcgggcucacgca

SEQ ID NO: 541993 - RNA, 32 nt, Human
uuggcucacugcaaccucugcuucccagguuu

SEQ ID NO: 541994 - RNA, 32 nt, Human
uuggcucacugcaaccucugcuucccgaguuc

SEQ ID NO: 541995 - RNA, 32 nt, Human
uuggcucacugcaaccucugcuucccggguuc

SEQ ID NO: 541996 - RNA, 32 nt, Human
uuggcucacugcaaccucugucucccagguuc

SEQ ID NO: 541997 - RNA, 32 nt, Human
uuggcucacugcaaccucugucuuccagguuc

SEQ ID NO: 541998 - RNA, 32 nt, Human
uuggcucacugcaacguccgccucccagguuc

SEQ ID NO: 541999 - RNA, 32 nt, Human
uuggcucacugcaacucugcuucccagguuca

SEQ ID NO: 542000 - RNA, 32 nt, Human
uuggcucacugcaacuuccaccucugggauca

SEQ ID NO: 542001 - RNA, 32 nt, Human
uuggcucacugcaacuuccacuucccggguuc

SEQ ID NO: 542002 - RNA, 32 nt, Human
uuggcucacugcaacuuccgccuccuguguuc

SEQ ID NO: 542003 - RNA, 32 nt, Human
uuggcucacugcaacuuccgucucccggguuc

SEQ ID NO: 542004 - RNA, 32 nt, Human
uuggcucacugcaacuucuaccuccgagguuc

SEQ ID NO: 542005 - RNA, 32 nt, Human
uuggcucacugcaacuucugccucuuggguuc

SEQ ID NO: 542006 - RNA, 32 nt, Human
uuggcucacugcaacuucugccuuccagguuc

SEQ ID NO: 542007 - RNA, 32 nt, Human
uuggcucacugcaacuugggccucccagguuc

SEQ ID NO: 542008 - RNA, 32 nt, Human
uuggcucacugcaagcuccaccuccuggguuc

SEQ ID NO: 542009 - RNA, 32 nt, Human
uuggcucacugcaagcuccgccucccagguuc

SEQ ID NO: 542010 - RNA, 32 nt, Human
uuggcucacugcaagcuccgccucccgaguuc

SEQ ID NO: 542011 - RNA, 32 nt, Human
uuggcucacugcaagcuccgccucccggcuuc

SEQ ID NO: 542012 - RNA, 32 nt, Human
uuggcucacugcaagcuccgccucccggguuc

SEQ ID NO: 542013 - RNA, 32 nt, Human
uuggcucacugcaagcuccgccucucggguuu

SEQ ID NO: 542014 - RNA, 32 nt, Human
uuggcucacugcaagcucugccucccggguuc

SEQ ID NO: 542015 - RNA, 32 nt, Human
uuggcucacugcaagcuuccccuuccggguuc

SEQ ID NO: 542016 - RNA, 32 nt, Human
uuggcucacugcaaucucuauccccuggguuc

SEQ ID NO: 542017 - RNA, 32 nt, Human
uuggcucacugcaaucucugccucucggguuc

SEQ ID NO: 542018 - RNA, 32 nt, Human
uuggcucacugcaaucucugccuuccggguuc

SEQ ID NO: 542019 - RNA, 32 nt, Human
uuggcucacugcacccuccgccuccugggcuc

SEQ ID NO: 542020 - RNA, 32 nt, Human
uuggcucacugcacccucugucuguugggcuc

SEQ ID NO: 542021 - RNA, 32 nt, Human
uuggcucacugcaccuccaccuuccgggcuca

SEQ ID NO: 542022 - RNA, 32 nt, Human
uuggcucacugcaccucugucucccaaguuca

SEQ ID NO: 542023 - RNA, 32 nt, Human
uuggcucacugcagccucaaccuguugggguc

SEQ ID NO: 542024 - RNA, 32 nt, Human
uuggcucacugcagccucaacuuccagcgcua

SEQ ID NO: 542025 - RNA, 32 nt, Human
uuggcucacugcagccucaacuucuuguccuc

SEQ ID NO: 542026 - RNA, 32 nt, Human
uuggcucacugcagccuccaccuccccgguuc

SEQ ID NO: 542027 - RNA, 32 nt, Human
uuggcucacugcagccuccaccucccggguuc

SEQ ID NO: 542028 - RNA, 32 nt, Human
uuggcucacugcagccuccaccuccugggcuc

SEQ ID NO: 542029 - RNA, 32 nt, Human
uuggcucacugcagccuccgccucccggguuc

SEQ ID NO: 542030 - RNA, 32 nt, Human
uuggcucacugcagccuccgccuucuggguuc

SEQ ID NO: 542031 - RNA, 32 nt, Human
uuggcucacugcagccucugccucccaggcuc

SEQ ID NO: 542032 - RNA, 32 nt, Human
uuggcucacugcagccucugccucccagguuc

SEQ ID NO: 542033 - RNA, 32 nt, Human
uuggcucacugcagccucugccucccggguuc

SEQ ID NO: 542034 - RNA, 32 nt, Human
uuggcucacugcagccucugcuccccaguagc

SEQ ID NO: 542035 - RNA, 32 nt, Human
uuggcucacugcagccuucgccucccggguuc

SEQ ID NO: 542036 - RNA, 32 nt, Human
uuggcucacugcaggcucugccucccgguuuc

SEQ ID NO: 542037 - RNA, 32 nt, Human
uuggcucacugcauccuccgccuuccagguuu

SEQ ID NO: 542038 - RNA, 32 nt, Human
uuggcucacugcugcaaccucccccuccuggg

SEQ ID NO: 542039 - RNA, 32 nt, Human
uuggcucacuguaaccuccaccucccaggcuc

SEQ ID NO: 542040 - RNA, 32 nt, Human
uuggcucacuucaaccuccgcccccaagguuc

SEQ ID NO: 542041 - RNA, 32 nt, Human
uuggcucagaauauccuuacaauuacaugaga

SEQ ID NO: 542042 - RNA, 32 nt, Human
uuggcucaggacugaagggaaggugguuggga

SEQ ID NO: 542043 - RNA, 32 nt, Human
uuggcucagugcaauccgccucccagguucaa

SEQ ID NO: 542044 - RNA, 32 nt, Human
uuggcucauaauccaggccucucuccacgugu

SEQ ID NO: 542045 - RNA, 32 nt, Human
uuggcucaucguaaccuccaccucccggguuc

SEQ ID NO: 542046 - RNA, 32 nt, Human
uuggcucauugcaaccuccgccucccucccag

SEQ ID NO: 542047 - RNA, 32 nt, Human
uuggcucauugcaaccucugccucccagguca

SEQ ID NO: 542048 - RNA, 32 nt, Human
uuggcucauuuaccuuuucucucccaucucau

SEQ ID NO: 542049 - RNA, 32 nt, Human
uuggcuccacuguaccgggggcugaggcccag

SEQ ID NO: 542050 - RNA, 32 nt, Human
uuggcuccaucccuccaggcucucauugugga

SEQ ID NO: 542051 - RNA, 32 nt, Human
uuggcucccacagcugcugccaguggccccca

SEQ ID NO: 542052 - RNA, 32 nt, Human
uuggcucccaggagcuccaggacagcccucug

SEQ ID NO: 542053 - RNA, 32 nt, Human
uuggcucccaggcuggaguccaguggugugau

SEQ ID NO: 542054 - RNA, 32 nt, Human
uuggcucccuacaacuuccaccucccagguuc

SEQ ID NO: 542055 - RNA, 32 nt, Human
uuggcucccuuccaccugucauucccaccacc

SEQ ID NO: 542056 - RNA, 32 nt, Human
uuggcuccuccccugguauaucuucuuuagug

SEQ ID NO: 542057 - RNA, 32 nt, Human
uuggcuccucuccccuuguuccugauuuuaau

SEQ ID NO: 542058 - RNA, 32 nt, Human
uuggcucgaugagcuuucucaaaggaaacaca

SEQ ID NO: 542059 - RNA, 32 nt, Human
uuggcucgcugcaaccucagcuuccagaguuc

SEQ ID NO: 542060 - RNA, 32 nt, Human
uuggcucgcugcaaccuccgccucccagguuc

SEQ ID NO: 542061 - RNA, 32 nt, Human
uuggcucgcugcaaccuucacccuucaccucc

SEQ ID NO: 542062 - RNA, 32 nt, Human
uuggcucgcugcagccuccaccucccagguuc

SEQ ID NO: 542063 - RNA, 32 nt, Human
uuggcucgcugcgccucugccucccagguuca

SEQ ID NO: 542064 - RNA, 32 nt, Human
uuggcucguggccccuuccuccaccuucaagc

SEQ ID NO: 542065 - RNA, 23 nt, Human
uuggcucuauuacuuucuguucc

SEQ ID NO: 542066 - RNA, 32 nt, Human
uuggcucucaucucccccauuccugugccuac

SEQ ID NO: 542067 - RNA, 32 nt, Human
uuggcucucgcaauuauggaggccaagaaguc

SEQ ID NO: 542068 - RNA, 23 nt, Human
uuggcucucuauagcauuuccug

SEQ ID NO: 542069 - RNA, 32 nt, Human
uuggcucucuauagcauuuccugacacuuccg

SEQ ID NO: 542070 - RNA, 32 nt, Human
uuggcucucugcaaccucugccucccagguuc

SEQ ID NO: 542071 - RNA, 32 nt, Human
uuggcucugcaaccuccacuucccagguucaa

SEQ ID NO: 542072 - RNA, 32 nt, Human
uuggcucugcaaccuccgccucccgguuuaaa

SEQ ID NO: 542073 - RNA, 32 nt, Human
uuggcucugcccaaggagaaauugugauguau

SEQ ID NO: 542074 - RNA, 32 nt, Human
uuggcucugugcauccuugaaaccagaaaggu

SEQ ID NO: 542075 - RNA, 32 nt, Human
uuggcucuuagcaaagcagguggcccacagug

SEQ ID NO: 542076 - RNA, 32 nt, Human
uuggcucuucauuuccaguguuucuacagugc

SEQ ID NO: 542077 - RNA, 32 nt, Human
uuggcucuuugaucuuaccucuacuccucuga

SEQ ID NO: 542078 - RNA, 32 nt, Human
uuggcugaacagggaaggaaaauaugucaaga

SEQ ID NO: 542079 - RNA, 32 nt, Human
uuggcugaaccugggagaccagcugggccucc

SEQ ID NO: 542080 - RNA, 32 nt, Human
uuggcugaaggugggagccggugugggagcuu

SEQ ID NO: 542081 - RNA, 32 nt, Human
uuggcugagacaauacaugugcaucauuuugg

SEQ ID NO: 542082 - RNA, 32 nt, Human
uuggcugagaggagggggagaaggaggggaag

SEQ ID NO: 542083 - RNA, 32 nt, Human
uuggcugagagggcuaccugcccagccccucc

SEQ ID NO: 542084 - RNA, 32 nt, Human
uuggcugagccccauucugggucaggcccucc

SEQ ID NO: 542085 - RNA, 32 nt, Human
uuggcugagccuggcuggagagcugcuaugcu

SEQ ID NO: 542086 - RNA, 32 nt, Human
uuggcugaguacucagagaauggaagcaccac

SEQ ID NO: 542087 - RNA, 32 nt, Human
uuggcugagucuggaaugucugccugugccuc

SEQ ID NO: 542088 - RNA, 32 nt, Human
uuggcugagugggcaccggcugccucaugguu

SEQ ID NO: 542089 - RNA, 32 nt, Human
uuggcugauacuccuaugcuugaguucaaagg

SEQ ID NO: 542090 - RNA, 32 nt, Human
uuggcugaugaaguaccugcucagcuuagcua

SEQ ID NO: 542091 - RNA, 32 nt, Human
uuggcugaugccucucauuaagaguugaaaac

SEQ ID NO: 542092 - RNA, 32 nt, Human
uuggcugauuauugcugccuauuuuagaacau

SEQ ID NO: 542093 - RNA, 32 nt, Human
uuggcugcaaagaaaucugcuuggaagaaggg

SEQ ID NO: 542094 - RNA, 32 nt, Human
uuggcugcaaguaacagaaacuccuaauucaa

SEQ ID NO: 542095 - RNA, 32 nt, Human
uuggcugcaggacucagagcauggacaggugg

SEQ ID NO: 542096 - RNA, 32 nt, Human
uuggcugcauagaagaaaaagguagaguuauu

SEQ ID NO: 542097 - RNA, 32 nt, Human
uuggcugccaagcacgcagaucccauggacau

SEQ ID NO: 542098 - RNA, 22 nt, Human
uuggcugccaucaucccuccca

SEQ ID NO: 542099 - RNA, 32 nt, Human
uuggcugcccaaagugcugggauuacaggcaa

SEQ ID NO: 542100 - RNA, 32 nt, Human
uuggcugcccugcuugugggccuguguggcac

SEQ ID NO: 542101 - RNA, 32 nt, Human
uuggcugccguuuuuaaauacuacccaagaag

SEQ ID NO: 542102 - RNA, 32 nt, Human
uuggcugccuccagaagagaugcagagagcug

SEQ ID NO: 542103 - RNA, 32 nt, Human
uuggcugccucugaggcuccccugggcugcgu

SEQ ID NO: 542104 - RNA, 32 nt, Human
uuggcugccuguggagcuccugugccagcagc

SEQ ID NO: 542105 - RNA, 32 nt, Human
uuggcugcuaaggaaacuuccucuccauugca

SEQ ID NO: 542106 - RNA, 32 nt, Human
uuggcugcuggcugagaggucacagcucugcc

SEQ ID NO: 542107 - RNA, 32 nt, Human
uuggcugcugggauagauaagcaugggcuuaa

SEQ ID NO: 542108 - RNA, 32 nt, Human
uuggcugcugugaccagaaacugcccaggccu

SEQ ID NO: 542109 - RNA, 32 nt, Human
uuggcugcuuagcaucccaagacuggaccugg

SEQ ID NO: 542110 - RNA, 32 nt, Human
uuggcugcuuagugggacugguggcccagaga

SEQ ID NO: 542111 - RNA, 19 nt, Human
uuggcugcuucuggggccu

SEQ ID NO: 542112 - RNA, 32 nt, Human
uuggcuggacccuauccuccuggcugauucug

SEQ ID NO: 542113 - RNA, 32 nt, Human
uuggcuggagaagaaaggacaagaggcagcag

SEQ ID NO: 542114 - RNA, 32 nt, Human
uuggcuggagcggagaugaggggccaccccgu

SEQ ID NO: 542115 - RNA, 32 nt, Human
uuggcuggcccagcugcucaggagccgggcug

SEQ ID NO: 542116 - RNA, 32 nt, Human
uuggcugggaaucuccaccuuaauccuuaaag

SEQ ID NO: 542117 - RNA, 32 nt, Human
uuggcugggaccccucauuaaccaaccaagca

SEQ ID NO: 542118 - RNA, 32 nt, Human
uuggcugggauuacaggcaugagccacugcac

SEQ ID NO: 542119 - RNA, 32 nt, Human
uuggcugggucugagugccacccccaggccac

SEQ ID NO: 542120 - RNA, 32 nt, Human
uuggcuggucucaaacuccugaccuuauaauc

SEQ ID NO: 542121 - RNA, 32 nt, Human
uuggcuggucugugcucugcuaggugaaaaau

SEQ ID NO: 542122 - RNA, 32 nt, Human
uuggcuggugcuggugccauggacucugccca

SEQ ID NO: 542123 - RNA, 32 nt, Human
uuggcugguggagaaggaggaggcagaauguc

SEQ ID NO: 542124 - RNA, 32 nt, Human
uuggcugguucuuuguucugucccccaugcuc

SEQ ID NO: 542125 - RNA, 32 nt, Human
uuggcuguaaguugccauuugaacuaaacgaa

SEQ ID NO: 542126 - RNA, 32 nt, Human
uuggcuguauguuauguaagauuuaauauguu

SEQ ID NO: 542127 - RNA, 32 nt, Human
uuggcugucaaaaggaggcaggagcaguucuc

SEQ ID NO: 542128 - RNA, 32 nt, Human
uuggcugucuggccucucaggugucagggcca

SEQ ID NO: 542129 - RNA, 32 nt, Human
uuggcugugaccugggggccucaggccuaacc

SEQ ID NO: 542130 - RNA, 32 nt, Human
uuggcugugagcuccuggggguggggguggcg

SEQ ID NO: 542131 - RNA, 32 nt, Human
uuggcugugagcuccuuggguacggguaccuu

SEQ ID NO: 542132 - RNA, 32 nt, Human
uuggcugugcugguucagcuagcucuccugag

SEQ ID NO: 542133 - RNA, 31 nt, Human
uuggcugugguggaaacuuugguggaggagg

SEQ ID NO: 542134 - RNA, 32 nt, Human
uuggcuguucagacagaagagcugaaucagca

SEQ ID NO: 542135 - RNA, 18 nt, Human
uuggcuguuugggauuuu

SEQ ID NO: 542136 - RNA, 32 nt, Human
uuggcuuaaagugaaaaagaagaaauagagaa

SEQ ID NO: 542137 - RNA, 32 nt, Human
uuggcuuacuauauacauucuugguggauaaa

SEQ ID NO: 542138 - RNA, 32 nt, Human
uuggcuuacugcaaccuccaccucccagguuc

SEQ ID NO: 542139 - RNA, 32 nt, Human
uuggcuuacugcaaccuccaccuccuggguuc

SEQ ID NO: 542140 - RNA, 32 nt, Human
uuggcuuacugcaaccuccgccucccagguuc

SEQ ID NO: 542141 - RNA, 32 nt, Human
uuggcuuacugcaaccuccgccuccuggguuc

SEQ ID NO: 542142 - RNA, 32 nt, Human
uuggcuuacugcaaccucugccucccagguuu

SEQ ID NO: 542143 - RNA, 32 nt, Human
uuggcuuacugcaacuuccgacucccagguuc

SEQ ID NO: 542144 - RNA, 32 nt, Human
uuggcuuagguuucagcgcccuucucaacccc

SEQ ID NO: 542145 - RNA, 32 nt, Human
uuggcuuaugaccagucugauugguugcagga

SEQ ID NO: 542146 - RNA, 32 nt, Human
uuggcuucacauaacauaucccuuagaacaga

SEQ ID NO: 542147 - RNA, 32 nt, Human
uuggcuucaugacaccacaguccuggucuuuc

SEQ ID NO: 542148 - RNA, 32 nt, Human
uuggcuuccacucagcaucagcguggcaguca

SEQ ID NO: 542149 - RNA, 32 nt, Human
uuggcuucccaaaguccugggauuacaggugu

SEQ ID NO: 542150 - RNA, 32 nt, Human
uuggcuucccaaagugcugggauuacaggcau

SEQ ID NO: 542151 - RNA, 32 nt, Human
uuggcuucccaaagugcugggauuacaggcgu

SEQ ID NO: 542152 - RNA, 32 nt, Human
uuggcuucccaaagugcugggauuauaggcag

SEQ ID NO: 542153 - RNA, 32 nt, Human
uuggcuucccaaagugcugggauuauaggcau

SEQ ID NO: 542154 - RNA, 32 nt, Human
uuggcuuccucgaaaagcaaagugaucuugaa

SEQ ID NO: 542155 - RNA, 32 nt, Human
uuggcuuccuuucuugguucauaaaugaauuu

SEQ ID NO: 542156 - RNA, 32 nt, Human
uuggcuucuaggaacaguugacuucccagaau

SEQ ID NO: 542157 - RNA, 32 nt, Human
uuggcuucuuucacucugggcuguguuuauga

SEQ ID NO: 542158 - RNA, 32 nt, Human
uuggcuugcuuccucuugacuauugggaguag

SEQ ID NO: 542159 - RNA, 32 nt, Human
uuggcuuggaaucaccaacucugccuguauug

SEQ ID NO: 542160 - RNA, 32 nt, Human
uuggcuuggaggcugagguaggaggaucgccu

SEQ ID NO: 542161 - RNA, 32 nt, Human
uuggcuuggcaucugcacuccagcccaggacu

SEQ ID NO: 542162 - RNA, 32 nt, Human
uuggcuugggaguagaagaagggucgucccug

SEQ ID NO: 542163 - RNA, 32 nt, Human
uuggcuuggucucuacccucacuaccucaguu

SEQ ID NO: 542164 - RNA, 32 nt, Human
uuggcuuggugaggacagcaggaggggcccac

SEQ ID NO: 542165 - RNA, 32 nt, Human
uuggcuuguaaaccuucgucucccucucuuuu

SEQ ID NO: 542166 - RNA, 32 nt, Human
uuggcuuuauuuuggggaaucaggggugagga

SEQ ID NO: 542167 - RNA, 32 nt, Human
uuggcuuucaaacauccuccuggcuugaguuu

SEQ ID NO: 542168 - RNA, 32 nt, Human
uuggcuuuccaaaguguugggauuacaagcgu

SEQ ID NO: 542169 - RNA, 32 nt, Human
uuggcuuucugcaaccucugccucccagguuc

SEQ ID NO: 542170 - RNA, 32 nt, Human
uuggcuuuuauccuagcaacuuacuuaagccu

SEQ ID NO: 542171 - RNA, 32 nt, Human
uuggcuuuucuccaagucuacgacgacgagcu

SEQ ID NO: 542172 - RNA, 32 nt, Human
uuggcuuuucugcagggucucugugauuuccc

SEQ ID NO: 542173 - RNA, 18 nt, Human
uuggcuuuucuggauuuu

SEQ ID NO: 542174 - RNA, 32 nt, Human
uuggcuuuugccacuuucuuccuugccuuugc

SEQ ID NO: 542175 - RNA, 32 nt, Human
uuggcuuuuugaaaaauugucuuuccuuauca

SEQ ID NO: 542176 - RNA, 32 nt, Human
uuggcuuuuugauaaacugcggccugcucuca

SEQ ID NO: 542177 - RNA, 22 nt, Human
uugggaaaacuacagagcuagg

SEQ ID NO: 542178 - RNA, 32 nt, Human
uugggaaaauagagaagagcaagagcaacaac

SEQ ID NO: 542179 - RNA, 23 nt, Human
uugggaaacagguaaaagcaagg

SEQ ID NO: 542180 - RNA, 32 nt, Human
uugggaaagagacagagugcugaggggcacuc

SEQ ID NO: 542181 - RNA, 32 nt, Human
uugggaaaggaggcaguggcagagggguugag

SEQ ID NO: 542182 - RNA, 32 nt, Human
uugggaaaugacuggggagacaccugaaagga

SEQ ID NO: 542183 - RNA, 31 nt, Human
uugggaacaugcuggaaauaaaacagcugca

SEQ ID NO: 542184 - RNA, 32 nt, Human
uugggaacaugcuggaaauaaaacagcugcac

SEQ ID NO: 542185 - RNA, 32 nt, Human
uugggaacccgaggcagguggaucaccugagg

SEQ ID NO: 542186 - RNA, 32 nt, Human
uugggaaccucauuagaaaugaccucagcugc

SEQ ID NO: 542187 - RNA, 32 nt, Human
uugggaacguggaaaagggucacugaauggga

SEQ ID NO: 542188 - RNA, 32 nt, Human
uugggaacuaccugcaucuucaguccccuuga

SEQ ID NO: 542189 - RNA, 32 nt, Human
uugggaacuauacucuuuuuauuuuuauuuuu

SEQ ID NO: 542190 - RNA, 32 nt, Human
uugggaacuccuaaccuagaacuaucugccau

SEQ ID NO: 542191 - RNA, 32 nt, Human
uugggaagaaauaggccucucccccaguccca

SEQ ID NO: 542192 - RNA, 32 nt, Human
uugggaagaagaucagauaauuagcuguaaug

SEQ ID NO: 542193 - RNA, 32 nt, Human
uugggaagacuccuagcuguccuuuuuccucu

SEQ ID NO: 542194 - RNA, 32 nt, Human
uugggaagagaaaguuaucaagagaaagaggu

SEQ ID NO: 542195 - RNA, 32 nt, Human
uugggaagagagagggacagggacaagggcaa

SEQ ID NO: 542196 - RNA, 32 nt, Human
uugggaagcagaggcuggaggaucauuucagc

SEQ ID NO: 542197 - RNA, 32 nt, Human
uugggaagcccaggcaggcagaucacuugagg

SEQ ID NO: 542198 - RNA, 32 nt, Human
uugggaagcccaggcgggcggaucacuugagg

SEQ ID NO: 542199 - RNA, 32 nt, Human
uugggaagccgaagcaggaggaucacuggagg

SEQ ID NO: 542200 - RNA, 32 nt, Human
uugggaagcuaaauaucaucuaucuucuagaa

SEQ ID NO: 542201 - RNA, 32 nt, Human
uugggaagcucugccuuggacucucccccacc

SEQ ID NO: 542202 - RNA, 32 nt, Human
uugggaagcugaagcaggagaaucacuuaaac

SEQ ID NO: 542203 - RNA, 32 nt, Human
uugggaagcugaagcaggaggauugcuugagc

SEQ ID NO: 542204 - RNA, 32 nt, Human
uugggaagcugaggaaggagaauugcuugaac

SEQ ID NO: 542205 - RNA, 32 nt, Human
uugggaagcugagguaggagaaucgcuugaac

SEQ ID NO: 542206 - RNA, 32 nt, Human
uugggaagcugagguggacggaucauuugagg

SEQ ID NO: 542207 - RNA, 32 nt, Human
uugggaaggaacagccuaaagaugcuuuguaa

SEQ ID NO: 542208 - RNA, 32 nt, Human
uugggaaggaaggucugaguucccugggaacu

SEQ ID NO: 542209 - RNA, 32 nt, Human
uugggaaggacacagcaguauuggacgguuuc

SEQ ID NO: 542210 - RNA, 32 nt, Human
uugggaagggagcugggggaggcaguggcggc

SEQ ID NO: 542211 - RNA, 32 nt, Human
uugggaaggugggcaggggcaagugaacucag

SEQ ID NO: 542212 - RNA, 32 nt, Human
uugggaaguggaggugggagaaucacuugagc

SEQ ID NO: 542213 - RNA, 32 nt, Human
uugggaagugggagcgggagggccgggcaauu

SEQ ID NO: 542214 - RNA, 32 nt, Human
uugggaaguuguuuauguggcuugugugcugg

SEQ ID NO: 542215 - RNA, 32 nt, Human
uugggaauaggcagggucagauuccagggcau

SEQ ID NO: 542216 - RNA, 32 nt, Human
uugggaaucaugguuuguuugcauuaguauga

SEQ ID NO: 542217 - RNA, 32 nt, Human
uugggaaugagcugaggcggauuuccccagag

SEQ ID NO: 542218 - RNA, 32 nt, Human
uugggaaugaguuggcucuggacguuucugcc

SEQ ID NO: 542219 - RNA, 32 nt, Human
uugggaauguuugucucaucccauucugcguc

SEQ ID NO: 542220 - RNA, 32 nt, Human
uugggacaagauaacauagcagaggaauuaau

SEQ ID NO: 542221 - RNA, 32 nt, Human
uugggacaccgaggcaggagaaucacuugaac

SEQ ID NO: 542222 - RNA, 32 nt, Human
uugggacagaguuucacucuuguugcccaggc

SEQ ID NO: 542223 - RNA, 32 nt, Human
uugggacaggcgccuaccugcuccucgggcac

SEQ ID NO: 542224 - RNA, 32 nt, Human
uugggacaugaaguuaaccacagucgggaaac

SEQ ID NO: 542225 - RNA, 22 nt, Human
uugggaccacaggcgugaacca

SEQ ID NO: 542226 - RNA, 32 nt, Human
uugggaccagccugaccaacauggugaaauau

SEQ ID NO: 542227 - RNA, 32 nt, Human
uugggaccagccuggccaacauggugaaaccc

SEQ ID NO: 542228 - RNA, 32 nt, Human
uugggaccagccugggcuauauagcaagaccc

SEQ ID NO: 542229 - RNA, 32 nt, Human
uugggaccccacacacuccaggugggaucaga

SEQ ID NO: 542230 - RNA, 32 nt, Human
uugggaccccacccuccuaucauggcccagga

SEQ ID NO: 542231 - RNA, 32 nt, Human
uugggaccccugauuuuagcaggauggcccaa

SEQ ID NO: 542232 - RNA, 32 nt, Human
uugggacccuccagugcuggauuugaugaguu

SEQ ID NO: 542233 - RNA, 32 nt, Human
uugggacccugacaguggggaaggcagaggag

SEQ ID NO: 542234 - RNA, 32 nt, Human
uugggacccugcgcauccccaucagggguucu

SEQ ID NO: 542235 - RNA, 32 nt, Human
uugggacccuuaaguguucugcaccuggggag

SEQ ID NO: 542236 - RNA, 32 nt, Human
uugggacccuugcaugguguuucaaagggugg

SEQ ID NO: 542237 - RNA, 32 nt, Human
uugggaccucaguuuucuuuuuguuuguuugu

SEQ ID NO: 542238 - RNA, 32 nt, Human
uugggaccugggaaguggggaccugggcagcg

SEQ ID NO: 542239 - RNA, 32 nt, Human
uugggacgcugcggccuggccuucaggccacu

SEQ ID NO: 542240 - RNA, 22 nt, Human
uugggacuacaggcgugagcca

SEQ ID NO: 542241 - RNA, 25 nt, Human
uugggacucaaggacuuugcugcug

SEQ ID NO: 542242 - RNA, 32 nt, Human
uugggacucccagggcagccagucugccccac

SEQ ID NO: 542243 - RNA, 32 nt, Human
uugggacugagcagcugggagcaggcgaccga

SEQ ID NO: 542244 - RNA, 20 nt, Human
uugggacugccuggcaacau

SEQ ID NO: 542245 - RNA, 32 nt, Human
uugggacuucuggcugcaauaggagcaaggga

SEQ ID NO: 542246 - RNA, 32 nt, Human
uugggacuucugguuuuggcuuuuucuuuuua

SEQ ID NO: 542247 - RNA, 32 nt, Human
uugggagaaaggcccuguuucccuggaacugc

SEQ ID NO: 542248 - RNA, 21 nt, Human
uugggagaacacccuacugcu

SEQ ID NO: 542249 - RNA, 32 nt, Human
uugggagaauggaaagcagaaagggaagccag

SEQ ID NO: 542250 - RNA, 32 nt, Human
uugggagaccgaggcaggcggaucaugagguc

SEQ ID NO: 542251 - RNA, 32 nt, Human
uugggagaccgaggcagguggaucaccugagg

SEQ ID NO: 542252 - RNA, 32 nt, Human
uugggagaccgaggcagguggaucacgagguc

SEQ ID NO: 542253 - RNA, 32 nt, Human
uugggagacuccaagacagcagcuccgagguc

SEQ ID NO: 542254 - RNA, 32 nt, Human
uugggagacugaggagggagaaucacuugagg

SEQ ID NO: 542255 - RNA, 32 nt, Human
uugggagacugaggcaagagaaucacuugaac

SEQ ID NO: 542256 - RNA, 32 nt, Human
uugggagacugaggcaggagaaucacuugaac

SEQ ID NO: 542257 - RNA, 32 nt, Human
uugggagacugaggcaggagaaucgcaugaac

SEQ ID NO: 542258 - RNA, 32 nt, Human
uugggagacugaggcaggagaaugauuugaac

SEQ ID NO: 542259 - RNA, 32 nt, Human
uugggagacugaggcaggagaauggcuugaac

SEQ ID NO: 542260 - RNA, 32 nt, Human
uugggagacugaggcaggagaauugcuugaaa

SEQ ID NO: 542261 - RNA, 32 nt, Human
uugggagacugaggcaggagaauugcuugaac

SEQ ID NO: 542262 - RNA, 32 nt, Human
uugggagacugaggcggaucaccugaggucag

SEQ ID NO: 542263 - RNA, 32 nt, Human
uugggagaggagaaaagaucugagaauguccu

SEQ ID NO: 542264 - RNA, 32 nt, Human
uugggagaggagagaagcuggacuccaggcau

SEQ ID NO: 542265 - RNA, 32 nt, Human
uugggagagggggagggaggggagacagagcc

SEQ ID NO: 542266 - RNA, 23 nt, Human
uugggagagugagacccagugga

SEQ ID NO: 542267 - RNA, 32 nt, Human
uugggagaguggugaguggaagggaggagcag

SEQ ID NO: 542268 - RNA, 32 nt, Human
uugggagaugcagcuuagccacaugcccauaa

SEQ ID NO: 542269 - RNA, 22 nt, Human
uugggagcacagcucuauucug

SEQ ID NO: 542270 - RNA, 22 nt, Human
uugggagcagaaguguccccgg

SEQ ID NO: 542271 - RNA, 32 nt, Human
uugggagcagcagccaccuggccucacucugg

SEQ ID NO: 542272 - RNA, 32 nt, Human
uugggagcagcucugcgugcggggccucagag

SEQ ID NO: 542273 - RNA, 32 nt, Human
uugggagcauggcagacagggaagggaaacau

SEQ ID NO: 542274 - RNA, 32 nt, Human
uugggagcauugagauguaagcucaggguuac

SEQ ID NO: 542275 - RNA, 32 nt, Human
uugggagccacugccacuccaguccugccacc

SEQ ID NO: 542276 - RNA, 32 nt, Human
uugggagccagccugccaacagccaccugggc

SEQ ID NO: 542277 - RNA, 23 nt, Human
uugggagccagcuacaacccaaa

SEQ ID NO: 542278 - RNA, 32 nt, Human
uugggagccagcugagaagagagcagacucac

SEQ ID NO: 542279 - RNA, 32 nt, Human
uugggagccauggagagugacuuuuaucugcg

SEQ ID NO: 542280 - RNA, 24 nt, Human
uugggagccauuagccuugcucug

SEQ ID NO: 542281 - RNA, 32 nt, Human
uugggagcccgaggcggguggaucagcugagg

SEQ ID NO: 542282 - RNA, 32 nt, Human
uugggagcccucaagugucuccuguccuugcc

SEQ ID NO: 542283 - RNA, 32 nt, Human
uugggagccucacugaacgccugcucugguug

SEQ ID NO: 542284 - RNA, 32 nt, Human
uugggagccugaggcaggagaacugcuugaac

SEQ ID NO: 542285 - RNA, 32 nt, Human
uugggagccugaggcaggcggaucaugagguc

SEQ ID NO: 542286 - RNA, 32 nt, Human
uugggagccugaggggccaucucccugacacu

SEQ ID NO: 542287 - RNA, 32 nt, Human
uugggagccuggggcaggagaaucacuugaac

SEQ ID NO: 542288 - RNA, 32 nt, Human
uugggagcgagggacaggagaauaauuuugau

SEQ ID NO: 542289 - RNA, 32 nt, Human
uugggagcgggcuuccagcucucagugggcag

SEQ ID NO: 542290 - RNA, 32 nt, Human
uugggagcucuauggcccuccccaccaccuga

SEQ ID NO: 542291 - RNA, 31 nt, Human
uugggagcugcucuaguuacauuccucccuu

SEQ ID NO: 542292 - RNA, 32 nt, Human
uugggagcuuuggcuuuugaucuuaagcuuau

SEQ ID NO: 542293 - RNA, 19 nt, Human
uugggaggaaggggcuacu

SEQ ID NO: 542294 - RNA, 32 nt, Human
uugggaggaagugccugcagccagguccugaa

SEQ ID NO: 542295 - RNA, 32 nt, Human
uugggaggacgaggcaggcggaucaugagguc

SEQ ID NO: 542296 - RNA, 32 nt, Human
uugggaggacgaggcggguggaucacucgaug

SEQ ID NO: 542297 - RNA, 32 nt, Human
uugggaggagcagagccagggagccaucuaca

SEQ ID NO: 542298 - RNA, 32 nt, Human
uugggaggagcagucucuccgcucgucucccg

SEQ ID NO: 542299 - RNA, 32 nt, Human
uugggaggaugaggcaggagaaucgcuugaac

SEQ ID NO: 542300 - RNA, 32 nt, Human
uugggaggcaaaggcagguggaucaccugagg

SEQ ID NO: 542301 - RNA, 32 nt, Human
uugggaggcagaggcaggagaaucauuugaac

SEQ ID NO: 542302 - RNA, 32 nt, Human
uugggaggcagaggcaggagaaucgcuugaac

SEQ ID NO: 542303 - RNA, 32 nt, Human
uugggaggcagaggcaggagaaucguuugaac

SEQ ID NO: 542304 - RNA, 32 nt, Human
uugggaggcagaggcaggagaauugcuugaac

SEQ ID NO: 542305 - RNA, 32 nt, Human
uugggaggcagaggcaggagaauugcuugagc

SEQ ID NO: 542306 - RNA, 32 nt, Human
uugggaggcagaggcagguggaucaccugagg

SEQ ID NO: 542307 - RNA, 32 nt, Human
uugggaggcagugggagaaucgcuugagcccg

SEQ ID NO: 542308 - RNA, 32 nt, Human
uugggaggccaaagcaggacgaucacuugagc

SEQ ID NO: 542309 - RNA, 32 nt, Human
uugggaggccaaagcaggaggauagcuugagg

SEQ ID NO: 542310 - RNA, 32 nt, Human
uugggaggccaaagcaggaggaucacuugagc

SEQ ID NO: 542311 - RNA, 32 nt, Human
uugggaggccaaagcaggaggaucgcuugagc

SEQ ID NO: 542312 - RNA, 32 nt, Human
uugggaggccaagaugggaggaucauuugagc

SEQ ID NO: 542313 - RNA, 32 nt, Human
uugggaggccaaggcagauggaucaugagguc

SEQ ID NO: 542314 - RNA, 32 nt, Human
uugggaggccaaggcaggagaagcgcuugagg

SEQ ID NO: 542315 - RNA, 32 nt, Human
uugggaggccaaggcaggagaaucgcucgaaa

SEQ ID NO: 542316 - RNA, 32 nt, Human
uugggaggccaaggcaggagaaucgcuugaac

SEQ ID NO: 542317 - RNA, 32 nt, Human
uugggaggccaaggcaggagaaugacaugaac

SEQ ID NO: 542318 - RNA, 32 nt, Human
uugggaggccaaggcagguagauuaugagguc

SEQ ID NO: 542319 - RNA, 32 nt, Human
uugggaggccaaggcagguggaucaccugagg

SEQ ID NO: 542320 - RNA, 32 nt, Human
uugggaggccaaggcagguggaucacgagguc

SEQ ID NO: 542321 - RNA, 32 nt, Human
uugggaggccaaggcagguggaucacuuaaga

SEQ ID NO: 542322 - RNA, 32 nt, Human
uugggaggccaaggcagguggaucacuugagg

SEQ ID NO: 542323 - RNA, 32 nt, Human
uugggaggccaaggcagguggaucaugauguc

SEQ ID NO: 542324 - RNA, 32 nt, Human
uugggaggccaaggcagguggaucauuugagg

SEQ ID NO: 542325 - RNA, 32 nt, Human
uugggaggccaaggcaggugggucaccugggg

SEQ ID NO: 542326 - RNA, 32 nt, Human
uugggaggccaaggcggguggaucaauugagg

SEQ ID NO: 542327 - RNA, 32 nt, Human
uugggaggccaaggcggguggaucacaagguc

SEQ ID NO: 542328 - RNA, 32 nt, Human
uugggaggccaaggcggguggaucacccgagg

SEQ ID NO: 542329 - RNA, 32 nt, Human
uugggaggccaaggcggguggaucaccugaca

SEQ ID NO: 542330 - RNA, 32 nt, Human
uugggaggccaaggcggguggaucaccugaga

SEQ ID NO: 542331 - RNA, 32 nt, Human
uugggaggccaaggcggguggaucaccugagg

SEQ ID NO: 542332 - RNA, 32 nt, Human
uugggaggccaaggcggguggaucacuugaga

SEQ ID NO: 542333 - RNA, 32 nt, Human
uugggaggccaaggcggguggaucacuugagg

SEQ ID NO: 542334 - RNA, 32 nt, Human
uugggaggccaagguggguggaucaucuaagg

SEQ ID NO: 542335 - RNA, 32 nt, Human
uugggaggccacccucuaccuucuugccuuuu

SEQ ID NO: 542336 - RNA, 32 nt, Human
uugggaggccacggcagguggaucaucugagg

SEQ ID NO: 542337 - RNA, 32 nt, Human
uugggaggccauagcaggaggauugcucgagc

SEQ ID NO: 542338 - RNA, 32 nt, Human
uugggaggccauggcagguggaucaccugagg

SEQ ID NO: 542339 - RNA, 32 nt, Human
uugggaggcccagacuggcggaucaccugagg

SEQ ID NO: 542340 - RNA, 32 nt, Human
uugggaggcccagauggggaggaucacuugac

SEQ ID NO: 542341 - RNA, 32 nt, Human
uugggaggcccaggcagacagaucaccagaug

SEQ ID NO: 542342 - RNA, 32 nt, Human
uugggaggcccaggcaggcagaucaccugagg

SEQ ID NO: 542343 - RNA, 32 nt, Human
uugggaggcccaggcaggcggaucacuugagg

SEQ ID NO: 542344 - RNA, 32 nt, Human
uugggaggcccaggcaggcgggucaugagguc

SEQ ID NO: 542345 - RNA, 25 nt, Human
uugggaggcccaggcgggcggauca

SEQ ID NO: 542346 - RNA, 32 nt, Human
uugggaggcccaggcgggcggaucacaagguc

SEQ ID NO: 542347 - RNA, 32 nt, Human
uugggaggcccaggcgggcggaucacgagguc

SEQ ID NO: 542348 - RNA, 32 nt, Human
uugggaggcccaggcggguggaucaaagguca

SEQ ID NO: 542349 - RNA, 32 nt, Human
uugggaggcccaggcggucgggucacgagguc

SEQ ID NO: 542350 - RNA, 32 nt, Human
uugggaggcccaggucaggggaucauuaaguc

SEQ ID NO: 542351 - RNA, 32 nt, Human
uugggaggcccaggugggcagaucaccugaag

SEQ ID NO: 542352 - RNA, 32 nt, Human
uugggaggcccaggugggcggaucacgaaguc

SEQ ID NO: 542353 - RNA, 32 nt, Human
uugggaggcccagguggggcgaucaccugagg

SEQ ID NO: 542354 - RNA, 32 nt, Human
uugggaggccgaaacaggcgaaucacuugagc

SEQ ID NO: 542355 - RNA, 32 nt, Human
uugggaggccgaagcaggaggauugcuugaau

SEQ ID NO: 542356 - RNA, 32 nt, Human
uugggaggccgaagcaggcggaucacgagguc

SEQ ID NO: 542357 - RNA, 32 nt, Human
uugggaggccgaagcaggcggaucacuugagg

SEQ ID NO: 542358 - RNA, 32 nt, Human
uugggaggccgaagcagguggaucacuugagg

SEQ ID NO: 542359 - RNA, 32 nt, Human
uugggaggccgaagcagguggaucaucugagg

SEQ ID NO: 542360 - RNA, 32 nt, Human
uugggaggccgaagcggguggaucaccugagg

SEQ ID NO: 542361 - RNA, 32 nt, Human
uugggaggccgacgugggagaaucacuugagc

SEQ ID NO: 542362 - RNA, 32 nt, Human
uugggaggccgagaaggguggaucaugagguc

SEQ ID NO: 542363 - RNA, 32 nt, Human
uugggaggccgagacaggcggaucaccugagg

SEQ ID NO: 542364 - RNA, 32 nt, Human
uugggaggccgagacagguggaucacgagguc

SEQ ID NO: 542365 - RNA, 32 nt, Human
uugggaggccgagacgggcacaucauuugagg

SEQ ID NO: 542366 - RNA, 32 nt, Human
uugggaggccgagacggguggaucaccugagg

SEQ ID NO: 542367 - RNA, 32 nt, Human
uugggaggccgagacggguggaucacgagguc

SEQ ID NO: 542368 - RNA, 32 nt, Human
uugggaggccgagauagguggaucaccugaag

SEQ ID NO: 542369 - RNA, 32 nt, Human
uugggaggccgagaugggugaaucaugagguc

SEQ ID NO: 542370 - RNA, 32 nt, Human
uugggaggccgagauggguggaucaccugagg

SEQ ID NO: 542371 - RNA, 32 nt, Human
uugggaggccgagauggguggaucaugagguc

SEQ ID NO: 542372 - RNA, 32 nt, Human
uugggaggccgagccaaguggaucacuugagg

SEQ ID NO: 542373 - RNA, 32 nt, Human
uugggaggccgaggagggcagaucaucugagg

SEQ ID NO: 542374 - RNA, 32 nt, Human
uugggaggccgaggagggugaaucaugagauc

SEQ ID NO: 542375 - RNA, 32 nt, Human
uugggaggccgaggaggguggaucacgagguc

SEQ ID NO: 542376 - RNA, 32 nt, Human
uugggaggccgaggaggguggaucaugagguc

SEQ ID NO: 542377 - RNA, 32 nt, Human
uugggaggccgaggcagacagaucaccugagg

SEQ ID NO: 542378 - RNA, 32 nt, Human
uugggaggccgaggcagauggaucacgagguc

SEQ ID NO: 542379 - RNA, 32 nt, Human
uugggaggccgaggcaggaagaucauugagcu

SEQ ID NO: 542380 - RNA, 32 nt, Human
uugggaggccgaggcaggagaaucgcuugaac

SEQ ID NO: 542381 - RNA, 32 nt, Human
uugggaggccgaggcaggagaaucgcuugagc

SEQ ID NO: 542382 - RNA, 32 nt, Human
uugggaggccgaggcaggagaaucucuugaac

SEQ ID NO: 542383 - RNA, 32 nt, Human
uugggaggccgaggcaggagaauugcuugaac

SEQ ID NO: 542384 - RNA, 32 nt, Human
uugggaggccgaggcaggaggaucaccugagg

SEQ ID NO: 542385 - RNA, 32 nt, Human
uugggaggccgaggcaggaggaucacuugagg

SEQ ID NO: 542386 - RNA, 32 nt, Human
uugggaggccgaggcaggcagaucacaagguc

SEQ ID NO: 542387 - RNA, 32 nt, Human
uugggaggccgaggcaggcagaucaccugagg

SEQ ID NO: 542388 - RNA, 32 nt, Human
uugggaggccgaggcaggcagaucaccuuagg

SEQ ID NO: 542389 - RNA, 32 nt, Human
uugggaggccgaggcaggcagaucacgagguc

SEQ ID NO: 542390 - RNA, 32 nt, Human
uugggaggccgaggcaggcagaucacgggguc

SEQ ID NO: 542391 - RNA, 32 nt, Human
uugggaggccgaggcaggcagaucacuugaac

SEQ ID NO: 542392 - RNA, 32 nt, Human
uugggaggccgaggcaggcagaucacuugagg

SEQ ID NO: 542393 - RNA, 32 nt, Human
uugggaggccgaggcaggcaggucacuugagg

SEQ ID NO: 542394 - RNA, 32 nt, Human
uugggaggccgaggcaggcggaucacaagguc

SEQ ID NO: 542395 - RNA, 32 nt, Human
uugggaggccgaggcaggcggaucacaugagg

SEQ ID NO: 542396 - RNA, 32 nt, Human
uugggaggccgaggcaggcggaucaccugaaa

SEQ ID NO: 542397 - RNA, 32 nt, Human
uugggaggccgaggcaggcggaucaccugaga

SEQ ID NO: 542398 - RNA, 32 nt, Human
uugggaggccgaggcaggcggaucaccugagg

SEQ ID NO: 542399 - RNA, 32 nt, Human
uugggaggccgaggcaggcggaucaccuuagg

SEQ ID NO: 542400 - RNA, 32 nt, Human
uugggaggccgaggcaggcggaucacgagguc

SEQ ID NO: 542401 - RNA, 32 nt, Human
uugggaggccgaggcaggcggaucacuugagg

SEQ ID NO: 542402 - RNA, 32 nt, Human
uugggaggccgaggcaggcggaucaugagguc

SEQ ID NO: 542403 - RNA, 32 nt, Human
uugggaggccgaggcaggcggaucaugugguc

SEQ ID NO: 542404 - RNA, 32 nt, Human
uugggaggccgaggcaggcggaucauuugaag

SEQ ID NO: 542405 - RNA, 32 nt, Human
uugggaggccgaggcaggcggaucccgagguc

SEQ ID NO: 542406 - RNA, 32 nt, Human
uugggaggccgaggcaggcggauuaccugagg

SEQ ID NO: 542407 - RNA, 32 nt, Human
uugggaggccgaggcaggcggauuaccuuagg

SEQ ID NO: 542408 - RNA, 32 nt, Human
uugggaggccgaggcaggcugaucacgagguc

SEQ ID NO: 542409 - RNA, 32 nt, Human
uugggaggccgaggcagggggaucaccugagg

SEQ ID NO: 542410 - RNA, 32 nt, Human
uugggaggccgaggcagguagaucaugagguc

SEQ ID NO: 542411 - RNA, 32 nt, Human
uugggaggccgaggcagguggaucaagagguc

SEQ ID NO: 542412 - RNA, 32 nt, Human
uugggaggccgaggcagguggaucacaagauc

SEQ ID NO: 542413 - RNA, 32 nt, Human
uugggaggccgaggcagguggaucacaagguc

SEQ ID NO: 542414 - RNA, 32 nt, Human
uugggaggccgaggcagguggaucacaagguu

SEQ ID NO: 542415 - RNA, 32 nt, Human
uugggaggccgaggcagguggaucacaaguuc

SEQ ID NO: 542416 - RNA, 32 nt, Human
uugggaggccgaggcagguggaucaccuaagg

SEQ ID NO: 542417 - RNA, 32 nt, Human
uugggaggccgaggcagguggaucaccugaga

SEQ ID NO: 542418 - RNA, 32 nt, Human
uugggaggccgaggcagguggaucaccugagg

SEQ ID NO: 542419 - RNA, 32 nt, Human
uugggaggccgaggcagguggaucacgagguc

SEQ ID NO: 542420 - RNA, 32 nt, Human
uugggaggccgaggcagguggaucacgauguc

SEQ ID NO: 542421 - RNA, 32 nt, Human
uugggaggccgaggcagguggaucacgugagg

SEQ ID NO: 542422 - RNA, 32 nt, Human
uugggaggccgaggcagguggaucacucaagc

SEQ ID NO: 542423 - RNA, 32 nt, Human
uugggaggccgaggcagguggaucacucaagg

SEQ ID NO: 542424 - RNA, 32 nt, Human
uugggaggccgaggcagguggaucacugaggu

SEQ ID NO: 542425 - RNA, 32 nt, Human
uugggaggccgaggcagguggaucacuugagc

SEQ ID NO: 542426 - RNA, 32 nt, Human
uugggaggccgaggcagguggaucacuugagg

SEQ ID NO: 542427 - RNA, 32 nt, Human
uugggaggccgaggcagguggaucauagguca

SEQ ID NO: 542428 - RNA, 32 nt, Human
uugggaggccgaggcagguggaucaugagguc

SEQ ID NO: 542429 - RNA, 32 nt, Human
uugggaggccgaggcagguggaucauuugagg

SEQ ID NO: 542430 - RNA, 32 nt, Human
uugggaggccgaggcagguggauugccugagg

SEQ ID NO: 542431 - RNA, 32 nt, Human
uugugccacugcacuccagccugggcgacaga

SEQ ID NO: 542432 - RNA, 32 nt, Human
uugugccacugcacuccagccugggcgacagu

SEQ ID NO: 542433 - RNA, 32 nt, Human
uugugccacugcacuccagccugggcgauaga

SEQ ID NO: 542434 - RNA, 32 nt, Human
uugugccacugcacuccagccuggguaacaga

SEQ ID NO: 542435 - RNA, 32 nt, Human
uugugccacugcacuccagccuggguaacagu

SEQ ID NO: 542436 - RNA, 32 nt, Human
uugugccacugcacuccagccuggguaagaga

SEQ ID NO: 542437 - RNA, 32 nt, Human
uugugccacugcacuccagccugggugaaaga

SEQ ID NO: 542438 - RNA, 32 nt, Human
uugugccacugcacuccagccugggugacaga

SEQ ID NO: 542439 - RNA, 32 nt, Human
uugugccacugcacuccagccugggugacagc

SEQ ID NO: 542440 - RNA, 32 nt, Human
uugugccacugcacuccagccugggugacagg

SEQ ID NO: 542441 - RNA, 32 nt, Human
uugugccacugcacuccagccugggugacuga

SEQ ID NO: 542442 - RNA, 32 nt, Human
uugugccacugcacuccagccuggguggcaga

SEQ ID NO: 542443 - RNA, 32 nt, Human
uugugccacugcacuccagccuggguuacaga

SEQ ID NO: 542444 - RNA, 32 nt, Human
uugugccacugcacuccagccuuggcaacaag

SEQ ID NO: 542445 - RNA, 32 nt, Human
uugugccacugcacuccagccuuggcaacaca

SEQ ID NO: 542446 - RNA, 32 nt, Human
uugugccacugcacuccagcgugggcaacgga

SEQ ID NO: 542447 - RNA, 32 nt, Human
uugugccacugcacuccagcuggguggcagag

SEQ ID NO: 542448 - RNA, 32 nt, Human
uugugccacugcacuccagcuuggugacagag

SEQ ID NO: 542449 - RNA, 32 nt, Human
uugugccacugcacuccagucuggacaacaga

SEQ ID NO: 542450 - RNA, 32 nt, Human
uugugccacugcacucccgccugggcgacaga

SEQ ID NO: 542451 - RNA, 32 nt, Human
uugugccacugcacucgagccugggugacaga

SEQ ID NO: 542452 - RNA, 32 nt, Human
uugugccacugcacucuagccuagguggcuga

SEQ ID NO: 542453 - RNA, 32 nt, Human
uugugccacugcacucuagccucggugacaga

SEQ ID NO: 542454 - RNA, 32 nt, Human
uugugccacugcacucuagccuggacagcaga

SEQ ID NO: 542455 - RNA, 32 nt, Human
uugugccacugcacucuagccugggcaauaag

SEQ ID NO: 542456 - RNA, 32 nt, Human
uugugccacugcacucuagccugggugacaaa

SEQ ID NO: 542457 - RNA, 32 nt, Human
uugugccacugcacucuagccugggugacaga

SEQ ID NO: 542458 - RNA, 32 nt, Human
uugugccacugcacugcagccugggcgacaau

SEQ ID NO: 542459 - RNA, 32 nt, Human
uugugccacugcacugcagccugggcuacaga

SEQ ID NO: 542460 - RNA, 32 nt, Human
uugugccacugcacugcaggcugggugacaga

SEQ ID NO: 542461 - RNA, 32 nt, Human
uugugccacugcacuucagccugggcgacaga

SEQ ID NO: 542462 - RNA, 32 nt, Human
uugugccacugcacuucagcuugggugacaga

SEQ ID NO: 542463 - RNA, 32 nt, Human
uugugccacugcacuuuucagccugggugcca

SEQ ID NO: 542464 - RNA, 32 nt, Human
uugugccacugcauaccagccuaggugacaga

SEQ ID NO: 542465 - RNA, 32 nt, Human
uugugccacugcauucuagccugggcgauaga

SEQ ID NO: 542466 - RNA, 32 nt, Human
uugugccacugcccuccagccugggugacaga

SEQ ID NO: 542467 - RNA, 32 nt, Human
uugugccacugccuccggccugggcgagagug

SEQ ID NO: 542468 - RNA, 32 nt, Human
uugugccacugcgcuccagccugggcgacaga

SEQ ID NO: 542469 - RNA, 32 nt, Human
uugugccacugcucuccagccugggaggcaca

SEQ ID NO: 542470 - RNA, 32 nt, Human
uugugccacuguacaccagccugggugacaga

SEQ ID NO: 542471 - RNA, 32 nt, Human
uugugccacuguacuccagccaggccacagag

SEQ ID NO: 542472 - RNA, 32 nt, Human
uugugccacuguacuccagccuggaagacaag

SEQ ID NO: 542473 - RNA, 32 nt, Human
uugugccacuguacuccagccuggcccacaga

SEQ ID NO: 542474 - RNA, 32 nt, Human
uugugccacuguacuccagccugggagauaga

SEQ ID NO: 542475 - RNA, 32 nt, Human
uugugccacuguacuccagccugggcgacaga

SEQ ID NO: 542476 - RNA, 32 nt, Human
uugugccacuguacuccagccugggugacaga

SEQ ID NO: 542477 - RNA, 32 nt, Human
uugugccacuguacuccagccuggugacagag

SEQ ID NO: 542478 - RNA, 32 nt, Human
uugugccacuguacugcagccugggugacaga

SEQ ID NO: 542479 - RNA, 32 nt, Human
uugugccacuguauuccauccugggcaacaga

SEQ ID NO: 542480 - RNA, 32 nt, Human
uugugccacuguuuuccagccugggcaauaca

SEQ ID NO: 542481 - RNA, 32 nt, Human
uugugccacuucacuccagccugggugacaaa

SEQ ID NO: 542482 - RNA, 32 nt, Human
uugugccacuucauuccagccugggcgacaga

SEQ ID NO: 542483 - RNA, 32 nt, Human
uugugccacuucccuccagccugggcaauaga

SEQ ID NO: 542484 - RNA, 32 nt, Human
uugugccagagccacagaagugugcuugguga

SEQ ID NO: 542485 - RNA, 32 nt, Human
uugugccaggagccucgcagggguugauggga

SEQ ID NO: 542486 - RNA, 32 nt, Human
uugugccaggaggugggguaugcggccaccag

SEQ ID NO: 542487 - RNA, 32 nt, Human
uugugccagugcacuccaggcuggacgacaga

SEQ ID NO: 542488 - RNA, 32 nt, Human
uugugccagugcacuccggccugggugacaga

SEQ ID NO: 542489 - RNA, 32 nt, Human
uugugccaguggguguugucauggcccauguc

SEQ ID NO: 542490 - RNA, 32 nt, Human
uugugccauugcacuacagccuggucaacaga

SEQ ID NO: 542491 - RNA, 32 nt, Human
uugugccauugcacuccaaccugggcaacaag

SEQ ID NO: 542492 - RNA, 32 nt, Human
uugugccauugcacuccagccuggacaacaag

SEQ ID NO: 542493 - RNA, 32 nt, Human
uugugccauugcacuccagccugggcaacaag

SEQ ID NO: 542494 - RNA, 32 nt, Human
uugugccauugcacuccagccugggcaacaga

SEQ ID NO: 542495 - RNA, 32 nt, Human
uugugccauugcacuccagccugggcaacgag

SEQ ID NO: 542496 - RNA, 32 nt, Human
uugugccauugcacuccagccugggcgacaag

SEQ ID NO: 542497 - RNA, 32 nt, Human
uugugccauugcacuccagccugggcgacaga

SEQ ID NO: 542498 - RNA, 32 nt, Human
uugugccauugcacuccagccugggcgacagu

SEQ ID NO: 542499 - RNA, 32 nt, Human
uugugccauugcacuccagccugggcuacaag

SEQ ID NO: 542500 - RNA, 32 nt, Human
uugugccauugcacuccagccugggugacaga

SEQ ID NO: 542501 - RNA, 32 nt, Human
uugugccauugcacuccagccugggugauaag

SEQ ID NO: 542502 - RNA, 32 nt, Human
uugugccauugcacucuagccugggcaacagg

SEQ ID NO: 542503 - RNA, 32 nt, Human
uugugccauugcacugcagccuggaugacaga

SEQ ID NO: 542504 - RNA, 32 nt, Human
uugugccauuggcugcucuuucuaguccccua

SEQ ID NO: 542505 - RNA, 32 nt, Human
uugugccauuguacuccagccugggcgacaaa

SEQ ID NO: 542506 - RNA, 28 nt, Human
uugugcccaaguguuucccucucucccu

SEQ ID NO: 542507 - RNA, 24 nt, Human
uugugcccaccagucagauccugu

SEQ ID NO: 542508 - RNA, 31 nt, Human
uugugcccacugugugggccuguguuguguc

SEQ ID NO: 542509 - RNA, 32 nt, Human
uugugcccagaaguuugaggcugcagugagcc

SEQ ID NO: 542510 - RNA, 32 nt, Human
uugugcccaggaguucaagaccagccugggca

SEQ ID NO: 542511 - RNA, 23 nt, Human
uugugcccaggcuggagugcaau

SEQ ID NO: 542512 - RNA, 32 nt, Human
uugugcccagggguugcaggcugcagugagcu

SEQ ID NO: 542513 - RNA, 28 nt, Human
uugugcccaggugcugcccacuccugau

SEQ ID NO: 542514 - RNA, 32 nt, Human
uugugcccaugggcuguggcguaugucagauc

SEQ ID NO: 542515 - RNA, 32 nt, Human
uugugcccauuaggaagcugauugcuuacggg

SEQ ID NO: 542516 - RNA, 18 nt, Human
uugugcccauuccuaaua

SEQ ID NO: 542517 - RNA, 32 nt, Human
uugugccccugcacuccagccugagcgacagu

SEQ ID NO: 542518 - RNA, 32 nt, Human
uugugccccugcauucuagccugggugacagu

SEQ ID NO: 542519 - RNA, 32 nt, Human
uugugccccugccuaggugccugugcugggug

SEQ ID NO: 542520 - RNA, 32 nt, Human
uugugcccgcucuggacuuuugcccauagugg

SEQ ID NO: 542521 - RNA, 32 nt, Human
uugugcccuagacuggagugcaauggcgccau

SEQ ID NO: 542522 - RNA, 32 nt, Human
uugugcccugcucuucagcaccaugggccuuc

SEQ ID NO: 542523 - RNA, 32 nt, Human
uugugcccuggaccucgggcacagcugucagc

SEQ ID NO: 542524 - RNA, 32 nt, Human
uugugccgcaaccaccucagccuggaugacgg

SEQ ID NO: 542525 - RNA, 32 nt, Human
uugugccgcugcacuccagccuggcgacaaag

SEQ ID NO: 542526 - RNA, 32 nt, Human
uugugccuaggaguucgaggcugcagugggcu

SEQ ID NO: 542527 - RNA, 22 nt, Human
uugugccuauuuccuccaaguc

SEQ ID NO: 542528 - RNA, 32 nt, Human
uugugccucacacuccagccuggguaacagag

SEQ ID NO: 542529 - RNA, 32 nt, Human
uugugccuccacugaugcaggagcugccaccc

SEQ ID NO: 542530 - RNA, 32 nt, Human
uugugccucccauccaugcacaggagggacug

SEQ ID NO: 542531 - RNA, 32 nt, Human
uugugccucucagauugcugaagugcugcugg

SEQ ID NO: 542532 - RNA, 32 nt, Human
uugugccucuuuguuuuuccccaaaccaaagc

SEQ ID NO: 542533 - RNA, 32 nt, Human
uugugccugaaaucccagcuaucaggaggcug

SEQ ID NO: 542534 - RNA, 32 nt, Human
uugugccugauaccugcacuccggcuuccuag

SEQ ID NO: 542535 - RNA, 20 nt, Human
uugugccugcccagagccug

SEQ ID NO: 542536 - RNA, 32 nt, Human
uugugccugccugugcagagggagaggcccug

SEQ ID NO: 542537 - RNA, 32 nt, Human
uugugccugcuuucgagggccuccuggacuca

SEQ ID NO: 542538 - RNA, 32 nt, Human
uugugccuggagcugcucuccuggccuccuug

SEQ ID NO: 542539 - RNA, 32 nt, Human
uugugccuggcuucuuucucucagccuuacau

SEQ ID NO: 542540 - RNA, 32 nt, Human
uugugccugggggagcguggaggcagggccuc

SEQ ID NO: 542541 - RNA, 32 nt, Human
uugugccuguaaucccagaacuuuggaaggcc

SEQ ID NO: 542542 - RNA, 32 nt, Human
uugugccuguaaucccagcuacuugggaggcu

SEQ ID NO: 542543 - RNA, 32 nt, Human
uugugccuguaauuccagcugcucuggaagcc

SEQ ID NO: 542544 - RNA, 32 nt, Human
uugugccuguagucccagcuacuugggaggcu

SEQ ID NO: 542545 - RNA, 19 nt, Human
uugugccuguaugauauca

SEQ ID NO: 542546 - RNA, 32 nt, Human
uugugccugucugcgccucucacacacagaua

SEQ ID NO: 542547 - RNA, 32 nt, Human
uugugccuguuucucuuauccuuucccgacau

SEQ ID NO: 542548 - RNA, 32 nt, Human
uugugccuugcacuccaugcauucugauaacg

SEQ ID NO: 542549 - RNA, 32 nt, Human
uugugccuuggugacugucaaauaaaagcaag

SEQ ID NO: 542550 - RNA, 19 nt, Human
uugugccuuuccuuucuca

SEQ ID NO: 542551 - RNA, 32 nt, Human
uugugccuuuuaggagcuuuauguuuagaaac

SEQ ID NO: 542552 - RNA, 32 nt, Human
uugugcgaggaggugaaggccacagugaccca

SEQ ID NO: 542553 - RNA, 32 nt, Human
uugugcgcugggaggcgcaucugcagcacuua

SEQ ID NO: 542554 - RNA, 32 nt, Human
uugugcgggcgggagggcaaugguggcagaga

SEQ ID NO: 542555 - RNA, 32 nt, Human
uugugcuacugcacuccaaucuggcaacagag

SEQ ID NO: 542556 - RNA, 32 nt, Human
uugugcuacugcacucuagauugggugacaga

SEQ ID NO: 542557 - RNA, 32 nt, Human
uugugcuauguggagcucacagccucacaugu

SEQ ID NO: 542558 - RNA, 32 nt, Human
uugugcuauugcacuccagccugggugacaga

SEQ ID NO: 542559 - RNA, 32 nt, Human
uugugcucaagugauucucccaucucagccuc

SEQ ID NO: 542560 - RNA, 19 nt, Human
uugugcucagcgcuaccug

SEQ ID NO: 542561 - RNA, 32 nt, Human
uugugcucaggccagagacuugcucacuuccu

SEQ ID NO: 542562 - RNA, 32 nt, Human
uugugcucaucagagaccccagccuggggaac

SEQ ID NO: 542563 - RNA, 32 nt, Human
uugugcuccagccugggcaacaagagugaaac

SEQ ID NO: 542564 - RNA, 32 nt, Human
uugugcuccagccugggcaacagagugagacu

SEQ ID NO: 542565 - RNA, 32 nt, Human
uugugcucccaaagugcugagauuacaggcgu

SEQ ID NO: 542566 - RNA, 32 nt, Human
uugugcucccacugcaucagacugcuuccauc

SEQ ID NO: 542567 - RNA, 32 nt, Human
uugugcuccucuugauuccugguuugacucag

SEQ ID NO: 542568 - RNA, 32 nt, Human
uugugcucuaaagagcggaccccagccucugc

SEQ ID NO: 542569 - RNA, 32 nt, Human
uugugcucugcagccuuuuucuucugaaaggc

SEQ ID NO: 542570 - RNA, 32 nt, Human
uugugcucuuugucauggcaaccagcuucuga

SEQ ID NO: 542571 - RNA, 32 nt, Human
uugugcugacacaccugccuguccaccccuca

SEQ ID NO: 542572 - RNA, 32 nt, Human
uugugcugcugcacuccagccugggagacaga

SEQ ID NO: 542573 - RNA, 32 nt, Human
uugugcugcugcacuccagccugggugaaaaa

SEQ ID NO: 542574 - RNA, 32 nt, Human
uugugcugggagaccggacccggggcugcaga

SEQ ID NO: 542575 - RNA, 32 nt, Human
uugugcugucucccucucccacccgugucugc

SEQ ID NO: 542576 - RNA, 32 nt, Human
uugugcugucuuccugugaccagcagauccug

SEQ ID NO: 542577 - RNA, 32 nt, Human
uugugcugugauguuucagggagcuugguggu

SEQ ID NO: 542578 - RNA, 32 nt, Human
uugugcuguggggaagggagaaggauuuguaa

SEQ ID NO: 542579 - RNA, 32 nt, Human
uugugcuguggggcugguagcucaggugggcg

SEQ ID NO: 542580 - RNA, 32 nt, Human
uugugcuguguucgugucuugcacuggaauuc

SEQ ID NO: 542581 - RNA, 32 nt, Human
uugugcuguucggcucuugaaucccagcgaug

SEQ ID NO: 542582 - RNA, 32 nt, Human
uugugcuuagcuuucagauuauggaugauuaa

SEQ ID NO: 542583 - RNA, 32 nt, Human
uugugcuuaguauuuaaaccugaacauugaaa

SEQ ID NO: 542584 - RNA, 32 nt, Human
uugugcuuaguccaauuccuugcacauaguag

SEQ ID NO: 542585 - RNA, 32 nt, Human
uugugcuuucauuuucuuaaugacuuuuaccu

SEQ ID NO: 542586 - RNA, 32 nt, Human
uugugcuuuugaaaagaguauacuuuuuacuu

SEQ ID NO: 542587 - RNA, 32 nt, Human
uugugcuuuuucuccccuccucuauuccuuuu

SEQ ID NO: 542588 - RNA, 32 nt, Human
uuguggaaagugaaggagcccuggagagcugg

SEQ ID NO: 542589 - RNA, 32 nt, Human
uuguggaauugacucaaaaaugagguacuuca

SEQ ID NO: 542590 - RNA, 32 nt, Human
uuguggacugguugguggaggugcaggugucc

SEQ ID NO: 542591 - RNA, 32 nt, Human
uuguggacuucacauggucaugcaggaaguga

SEQ ID NO: 542592 - RNA, 32 nt, Human
uuguggagaagcgaagggcugaggggagguuu

SEQ ID NO: 542593 - RNA, 32 nt, Human
uuguggagaaggaagcauucuuuaggcugcgg

SEQ ID NO: 542594 - RNA, 32 nt, Human
uuguggagaagguagcccaggagcagggcggc

SEQ ID NO: 542595 - RNA, 32 nt, Human
uuguggagacaaggucucuccauguugccuag

SEQ ID NO: 542596 - RNA, 32 nt, Human
uuguggagagagccccuaaaauggagccuggc

SEQ ID NO: 542597 - RNA, 32 nt, Human
uuguggagaugggguuucaccauguugccaag

SEQ ID NO: 542598 - RNA, 32 nt, Human
uuguggagaugggguuucaccauguuggccag

SEQ ID NO: 542599 - RNA, 32 nt, Human
uuguggagaugggguuucacuauguugccuaa

SEQ ID NO: 542600 - RNA, 32 nt, Human
uuguggagaugggguuucaucauguuggccag

SEQ ID NO: 542601 - RNA, 32 nt, Human
uuguggagcugggggaagaaaccugcaauaug

SEQ ID NO: 542602 - RNA, 32 nt, Human
uuguggagcugucaucagcucagcuuuaacaa

SEQ ID NO: 542603 - RNA, 32 nt, Human
uuguggagguuuuguuggugugcaauggagga

SEQ ID NO: 542604 - RNA, 32 nt, Human
uuguggagugccucucucuaggacggggcugc

SEQ ID NO: 542605 - RNA, 32 nt, Human
uuguggauacauaucaaaugcuguaauauauu

SEQ ID NO: 542606 - RNA, 32 nt, Human
uuguggauagacugaaaugcaccaccaaggcc

SEQ ID NO: 542607 - RNA, 32 nt, Human
uuguggaucacugacauggucaggggaggccc

SEQ ID NO: 542608 - RNA, 21 nt, Human
uuguggauccaccacacccca

SEQ ID NO: 542609 - RNA, 32 nt, Human
uuguggauccaccacaccccaccgagcacuag

SEQ ID NO: 542610 - RNA, 32 nt, Human
uuguggaugagagacucacacccagucccugg

SEQ ID NO: 542611 - RNA, 32 nt, Human
uuguggaugagcugcaggugcagugacuccag

SEQ ID NO: 542612 - RNA, 32 nt, Human
uuguggaugagcugcaggugcagugcuccagc

SEQ ID NO: 542613 - RNA, 32 nt, Human
uuguggaugcuggccauggugggcaggcgccu

SEQ ID NO: 542614 - RNA, 32 nt, Human
uuguggauguacaguauaagcaucuaauucaa

SEQ ID NO: 542615 - RNA, 22 nt, Human
uuguggauuucacaucacucca

SEQ ID NO: 542616 - RNA, 32 nt, Human
uuguggcaagugacaaagauagcuguaugcuc

SEQ ID NO: 542617 - RNA, 32 nt, Human
uuguggcaaucaaagggguggaaagugaauuc

SEQ ID NO: 542618 - RNA, 32 nt, Human
uuguggcacugcacuccagucugggugacaga

SEQ ID NO: 542619 - RNA, 32 nt, Human
uuguggcacugccucccuugucucuccagccu

SEQ ID NO: 542620 - RNA, 32 nt, Human
uuguggcagcugagccacugaggccagccucg

SEQ ID NO: 542621 - RNA, 32 nt, Human
uuguggcaggcccugguggcagcugggcuggu

SEQ ID NO: 542622 - RNA, 32 nt, Human
uuguggcagucugaacgcccccagaaaauugu

SEQ ID NO: 542623 - RNA, 32 nt, Human
uuguggcaugcucuuugggagcugcacaguua

SEQ ID NO: 542624 - RNA, 32 nt, Human
uuguggcauugcacuccagccugggugguaga

SEQ ID NO: 542625 - RNA, 32 nt, Human
uuguggcauuuuccuguauugucuuggacaug

SEQ ID NO: 542626 - RNA, 32 nt, Human
uuguggcauuuuuccuugccuuccucggaggg

SEQ ID NO: 542627 - RNA, 32 nt, Human
uuguggccaagaggcuuccuggcauccacccc

SEQ ID NO: 542628 - RNA, 32 nt, Human
uuguggccauguaccgcuaccugggcgaagcg

SEQ ID NO: 542629 - RNA, 19 nt, Human
uuguggccgggugcagugg

SEQ ID NO: 542630 - RNA, 32 nt, Human
uuguggccgguuuucuccgcagguugaacaug

SEQ ID NO: 542631 - RNA, 32 nt, Human
uuguggccuguaaucccagcuacucgggaggc

SEQ ID NO: 542632 - RNA, 32 nt, Human
uuguggcgggagcagaggacagcgagguucag

SEQ ID NO: 542633 - RNA, 32 nt, Human
uuguggcgucacugcacuguuaccccgcccua

SEQ ID NO: 542634 - RNA, 32 nt, Human
uuguggcucacugcaaacuccacuucccuagu

SEQ ID NO: 542635 - RNA, 32 nt, Human
uuguggcucccccucuggaggagguggcucca

SEQ ID NO: 542636 - RNA, 32 nt, Human
uuguggcucuuauuucugaauucaaagcuugu

SEQ ID NO: 542637 - RNA, 32 nt, Human
uuguggcuggcuucccuuucugucugcuauug

SEQ ID NO: 542638 - RNA, 32 nt, Human
uuguggcuggucuccuggugucaguguucucu

SEQ ID NO: 542639 - RNA, 32 nt, Human
uuguggcuguaaagcuguagcagcucagguag

SEQ ID NO: 542640 - RNA, 32 nt, Human
uuguggcugugccaggaguacaugugagacua

SEQ ID NO: 542641 - RNA, 32 nt, Human
uuguggcuuccaccagcccuaauggagugcuc

SEQ ID NO: 542642 - RNA, 32 nt, Human
uuguggcuuccuaaaauucaguggaaaauuaa

SEQ ID NO: 542643 - RNA, 32 nt, Human
uugugggaaacugaggcccagcuuggggaagg

SEQ ID NO: 542644 - RNA, 32 nt, Human
uugugggaaagacagaggcgggaggauugagu

SEQ ID NO: 542645 - RNA, 32 nt, Human
uugugggaaccacagaugguugggguugaaca

SEQ ID NO: 542646 - RNA, 32 nt, Human
uugugggaagacagggugaauuuaucacagag

SEQ ID NO: 542647 - RNA, 32 nt, Human
uugugggaagagggagguuccaccgcaccccu

SEQ ID NO: 542648 - RNA, 32 nt, Human
uugugggaagagggugcagcacuggaccccuu

SEQ ID NO: 542649 - RNA, 32 nt, Human
uugugggaaggcacuccucuuggcauuugcuu

SEQ ID NO: 542650 - RNA, 32 nt, Human
uugugggacuuuaccaaaucgguuuguaauaa

SEQ ID NO: 542651 - RNA, 32 nt, Human
uugugggaggccuuggugauucggccacagcc

SEQ ID NO: 542652 - RNA, 32 nt, Human
uugugggagggugggcagggaggggucccaga

SEQ ID NO: 542653 - RNA, 32 nt, Human
uugugggcaaaagagaaaaagaaggauugauc

SEQ ID NO: 542654 - RNA, 32 nt, Human
uugugggcacacugccuauggguagcccugcu

SEQ ID NO: 542655 - RNA, 32 nt, Human
uugugggcagccagcaccucuaccuguuccuc

SEQ ID NO: 542656 - RNA, 32 nt, Human
uugugggcagcugcaggccccaugccucuccu

SEQ ID NO: 542657 - RNA, 31 nt, Human
uugugggcaguguccagacagaagaagagac

SEQ ID NO: 542658 - RNA, 32 nt, Human
uugugggcauugcucuaaccuacuucucaagc

SEQ ID NO: 542659 - RNA, 32 nt, Human
uugugggccggccuugggggagggggacgcgc

SEQ ID NO: 542660 - RNA, 20 nt, Human
uugugggccgggcgcagugg

SEQ ID NO: 542661 - RNA, 32 nt, Human
uugugggcucaaauauuuggucaugggggaag

SEQ ID NO: 542662 - RNA, 32 nt, Human
uuguggggaaaaggaaagaugggggacacuuc

SEQ ID NO: 542663 - RNA, 32 nt, Human
uuguggggagguggcuucagaggcucacaagc

SEQ ID NO: 542664 - RNA, 32 nt, Human
uuguggggccugggcuucugugguuuaaggga

SEQ ID NO: 542665 - RNA, 32 nt, Human
uuguggggcucaauaaauggcucugugaacuu

SEQ ID NO: 542666 - RNA, 32 nt, Human
uuguggggcuucuguuccgcugggggagacag

SEQ ID NO: 542667 - RNA, 32 nt, Human
uugugggggaggugugggggcaguguccaucc

SEQ ID NO: 542668 - RNA, 32 nt, Human
uugugggguggagggaggaagggcugggaggg

SEQ ID NO: 542669 - RNA, 32 nt, Human
uugugggguuguggagguugugggggcggugg

SEQ ID NO: 542670 - RNA, 32 nt, Human
uugugggguuuuucuguauuagcuuaugaacu

SEQ ID NO: 542671 - RNA, 31 nt, Human
uugugggucacacucuuuacauuucuguaag

SEQ ID NO: 542672 - RNA, 32 nt, Human
uugugggucaucuugcaccuuuacaaacaagg

SEQ ID NO: 542673 - RNA, 32 nt, Human
uugugggucaugcugggaaguggcccggcugc

SEQ ID NO: 542674 - RNA, 32 nt, Human
uugugggucucugucuuuuucucccaguggca

SEQ ID NO: 542675 - RNA, 32 nt, Human
uugugggucuuucuguucccaagauccugaac

SEQ ID NO: 542676 - RNA, 32 nt, Human
uugugggugaagccagggagggagacaggagg

SEQ ID NO: 542677 - RNA, 32 nt, Human
uugugggugagaaucuauguacauauaauaug

SEQ ID NO: 542678 - RNA, 32 nt, Human
uugugggugagggucgagggccaccgaggucc

SEQ ID NO: 542679 - RNA, 32 nt, Human
uugugggugaugaucacugugcugcuuguggc

SEQ ID NO: 542680 - RNA, 32 nt, Human
uugugggugggugggcugaauggggaggaaau

SEQ ID NO: 542681 - RNA, 32 nt, Human
uuguggguguccccacuggaguguaagcccua

SEQ ID NO: 542682 - RNA, 26 nt, Human
uugugguacgcaggcuggagugcagu

SEQ ID NO: 542683 - RNA, 32 nt, Human
uugugguauuuuuaguagagacaggguuucac

SEQ ID NO: 542684 - RNA, 32 nt, Human
uuguggucaccaacuguccuaaaaagauuugg

SEQ ID NO: 542685 - RNA, 32 nt, Human
uuguggucacuagcuucaguccuucuggauug

SEQ ID NO: 542686 - RNA, 32 nt, Human
uuguggucacucacucacccugacccugggca

SEQ ID NO: 542687 - RNA, 32 nt, Human
uugugguccugccucuuuucuaagcauauggc

SEQ ID NO: 542688 - RNA, 32 nt, Human
uuguggucuaugaguuuacaauacugcaaacu

SEQ ID NO: 542689 - RNA, 32 nt, Human
uuguggucuuccuaugugucagaaacaacugu

SEQ ID NO: 542690 - RNA, 32 nt, Human
uuguggugagacugaauuuugggcucagacac

SEQ ID NO: 542691 - RNA, 32 nt, Human
uuguggugcugacaaagcuuggaagagccugc

SEQ ID NO: 542692 - RNA, 32 nt, Human
uugugguggaggugauuugggauagacuaggu

SEQ ID NO: 542693 - RNA, 32 nt, Human
uuguggugggcccugaguccugguuuccuggc

SEQ ID NO: 542694 - RNA, 32 nt, Human
uuguggugugagauguuccuggaacucagcca

SEQ ID NO: 542695 - RNA, 32 nt, Human
uugugguucccaaugugucugucccacccuga

SEQ ID NO: 542696 - RNA, 32 nt, Human
uugugguucuuggggccuuccucuuuguuucu

SEQ ID NO: 542697 - RNA, 32 nt, Human
uugugguugagggaaggacaagagauaagagg

SEQ ID NO: 542698 - RNA, 32 nt, Human
uugugguugcagcuguuuucgugucauguaua

SEQ ID NO: 542699 - RNA, 32 nt, Human
uugugguuguugcccaggcuggagugcagugg

SEQ ID NO: 542700 - RNA, 32 nt, Human
uugugguuuaaggagaauaaaguugacuacau

SEQ ID NO: 542701 - RNA, 32 nt, Human
uugugguuuccucuuuaagacagggucuugcu

SEQ ID NO: 542702 - RNA, 19 nt, Human
uugugguuucucugaguca

SEQ ID NO: 542703 - RNA, 32 nt, Human
uuguguaaaccagaccccuuguccucaugacc

SEQ ID NO: 542704 - RNA, 32 nt, Human
uuguguaacauacuuccaccagcaguccaaca

SEQ ID NO: 542705 - RNA, 32 nt, Human
uuguguaacugaaucuugugcuucauuuccuu

SEQ ID NO: 542706 - RNA, 32 nt, Human
uuguguaagacaguaacuuuacacuucagaca

SEQ ID NO: 542707 - RNA, 32 nt, Human
uuguguaaguucauacuuggucugagccacug

SEQ ID NO: 542708 - RNA, 32 nt, Human
uuguguaauauauuguacacuacagcaucuua

SEQ ID NO: 542709 - RNA, 32 nt, Human
uuguguaauugagcuguaacccagggacagga

SEQ ID NO: 542710 - RNA, 32 nt, Human
uuguguacaccaugcccauguauauacaagua

SEQ ID NO: 542711 - RNA, 32 nt, Human
uuguguacccuucacccagccucccccaaugg

SEQ ID NO: 542712 - RNA, 32 nt, Human
uuguguacuuucacaaacaaaggcuuagaauu

SEQ ID NO: 542713 - RNA, 32 nt, Human
uuguguagacugcagacauccauaccucacca

SEQ ID NO: 542714 - RNA, 32 nt, Human
uuguguaggugagagaaagagggaggagugag

SEQ ID NO: 542715 - RNA, 32 nt, Human
uuguguaguaagcaccuuuguucauacuagua

SEQ ID NO: 542716 - RNA, 32 nt, Human
uuguguauacuucugugucuguuauguucaau

SEQ ID NO: 542717 - RNA, 32 nt, Human
uuguguauagaagaagcuggugagagugcccu

SEQ ID NO: 542718 - RNA, 32 nt, Human
uuguguaucaguucucuaacacuuguuccuga

SEQ ID NO: 542719 - RNA, 32 nt, Human
uuguguauccguaauaauguccuugaagucag

SEQ ID NO: 542720 - RNA, 32 nt, Human
uuguguaucuguccuguuagaaguagaugacu

SEQ ID NO: 542721 - RNA, 32 nt, Human
uuguguaucuuuggacaauuagauggacauuu

SEQ ID NO: 542722 - RNA, 32 nt, Human
uuguguaugacagcuuuccuucacacacuauu

SEQ ID NO: 542723 - RNA, 32 nt, Human
uuguguauggaaggcggggcucauggcugauu

SEQ ID NO: 542724 - RNA, 32 nt, Human
uuguguauguuauuucuggaagcauguuaggu

SEQ ID NO: 542725 - RNA, 32 nt, Human
uuguguauguuauuugccaaagacagauauaa

SEQ ID NO: 542726 - RNA, 32 nt, Human
uugugucaaauagaaagguacuguaggcagug

SEQ ID NO: 542727 - RNA, 32 nt, Human
uugugucaacuucuaagccaaaguuugggaau

SEQ ID NO: 542728 - RNA, 32 nt, Human
uugugucacaguucacugcagccugggugaca

SEQ ID NO: 542729 - RNA, 32 nt, Human
uugugucacccaggcuggagugcaauggcgca

SEQ ID NO: 542730 - RNA, 32 nt, Human
uugugucacccaggcuggcgugcagggcccug

SEQ ID NO: 542731 - RNA, 32 nt, Human
uugugucacccagguuagaguguaguggcgcc

SEQ ID NO: 542732 - RNA, 32 nt, Human
uugugucacugcacuccagccugggcaacagg

SEQ ID NO: 542733 - RNA, 32 nt, Human
uugugucacugcacuccagcuugggugacaga

SEQ ID NO: 542734 - RNA, 32 nt, Human
uugugucaggggcugccagccuccuuuuguuu

SEQ ID NO: 542735 - RNA, 31 nt, Human
uugugucaguuucagauccugaucuuaagag

SEQ ID NO: 542736 - RNA, 32 nt, Human
uugugucaucuucuuaccaugaucaaaggcga

SEQ ID NO: 542737 - RNA, 32 nt, Human
uugugucauucuuacauuccucuccuucucag

SEQ ID NO: 542738 - RNA, 32 nt, Human
uugugucauugcacuccagccugggcaacaag

SEQ ID NO: 542739 - RNA, 32 nt, Human
uugugucauugcacuccagccuggggaacaga

SEQ ID NO: 542740 - RNA, 23 nt, Human
uuguguccaggcuggagugcagu

SEQ ID NO: 542741 - RNA, 24 nt, Human
uuguguccaggcuggagugcagug

SEQ ID NO: 542742 - RNA, 32 nt, Human
uuguguccaucugcuuugaccugggcauuaga

SEQ ID NO: 542743 - RNA, 32 nt, Human
uuguguccccuaaaaaguggcucugcuucaga

SEQ ID NO: 542744 - RNA, 32 nt, Human
uuguguccuccaggagcuucuuguuuccuugu

SEQ ID NO: 542745 - RNA, 32 nt, Human
uuguguccugcagguaucugcagauuuauggc

SEQ ID NO: 542746 - RNA, 32 nt, Human
uuguguccugcucuguuuggugggccauaugc

SEQ ID NO: 542747 - RNA, 32 nt, Human
uugugucgaagccccagugcucugccuggaaa

SEQ ID NO: 542748 - RNA, 32 nt, Human
uugugucgccuuuggugggccauguccuaauu

SEQ ID NO: 542749 - RNA, 32 nt, Human
uugugucuaauacuugaccuguccugcuguuu

SEQ ID NO: 542750 - RNA, 32 nt, Human
uugugucuacacaucggggugaccuuagguca

SEQ ID NO: 542751 - RNA, 32 nt, Human
uugugucuacacaucggggugaccuuaggucg

SEQ ID NO: 542752 - RNA, 32 nt, Human
uugugucuacagccacugaauccuguccuaca

SEQ ID NO: 542753 - RNA, 19 nt, Human
uugugucuauugaaaguau

SEQ ID NO: 542754 - RNA, 19 nt, Human
uugugucucaggaaagcau

SEQ ID NO: 542755 - RNA, 32 nt, Human
uugugucucaucucccugcgugucuuuuccuu

SEQ ID NO: 542756 - RNA, 32 nt, Human
uugugucucauggggguuugguguacaaauaa

SEQ ID NO: 542757 - RNA, 32 nt, Human
uugugucuccacccccuuccauguguugaaua

SEQ ID NO: 542758 - RNA, 32 nt, Human
uugugucucccccaucucauccuuuuccccgg

SEQ ID NO: 542759 - RNA, 32 nt, Human
uugugucuccccucagacugcggcucccugag

SEQ ID NO: 542760 - RNA, 19 nt, Human
uugugucuccuuccuaagc

SEQ ID NO: 542761 - RNA, 19 nt, Human
uugugucucgcuuugagca

SEQ ID NO: 542762 - RNA, 32 nt, Human
uugugucugcagcagaaggccccagccucgug

SEQ ID NO: 542763 - RNA, 32 nt, Human
uugugucugcuaagaagucugauuucugcuca

SEQ ID NO: 542764 - RNA, 32 nt, Human
uugugucugugaugaaaggaacagucugugca

SEQ ID NO: 542765 - RNA, 22 nt, Human
uugugucugugugugacagcau

SEQ ID NO: 542766 - RNA, 32 nt, Human
uugugucuucauuuuaauguguuugcaaucgc

SEQ ID NO: 542767 - RNA, 32 nt, Human
uugugucuucauuuuuccuccugucugcauuc

SEQ ID NO: 542768 - RNA, 32 nt, Human
uugugucuuccagauggguaccacagauggcu

SEQ ID NO: 542769 - RNA, 32 nt, Human
uugugucuuccccuggggaugaggguugggug

SEQ ID NO: 542770 - RNA, 19 nt, Human
uugugucuucuggguccuu

SEQ ID NO: 542771 - RNA, 32 nt, Human
uugugucuugugucaggccuugcccuucccac

SEQ ID NO: 542772 - RNA, 32 nt, Human
uugugucuuucuaaauuucucucuccaaaaua

SEQ ID NO: 542773 - RNA, 32 nt, Human
uugugucuuugcucaagucccaccuccccaag

SEQ ID NO: 542774 - RNA, 32 nt, Human
uugugucuuuugucacaaaacaaugauauuug

SEQ ID NO: 542775 - RNA, 32 nt, Human
uugugugaacaucacagaguguuacuuacaca

SEQ ID NO: 542776 - RNA, 22 nt, Human
uugugugaacucucggcuguuu

SEQ ID NO: 542777 - RNA, 32 nt, Human
uugugugacagaaguagcaaaaucugguccuc

SEQ ID NO: 542778 - RNA, 32 nt, Human
uugugugacagaaguagcaaaaucugguccuu

SEQ ID NO: 542779 - RNA, 32 nt, Human
uugugugauagaauaaaaauauguuaccugca

SEQ ID NO: 542780 - RNA, 32 nt, Human
uugugugauuccauuuccagacagaaagcaga

SEQ ID NO: 542781 - RNA, 32 nt, Human
uugugugcaaaggauggacagaaggacugccu

SEQ ID NO: 542782 - RNA, 32 nt, Human
uugugugcacacauggccucauuggcucucag

SEQ ID NO: 542783 - RNA, 32 nt, Human
uugugugcagugaccacuguugcugccaccau

SEQ ID NO: 542784 - RNA, 32 nt, Human
uugugugcaucuggccuggaacugguguuaag

SEQ ID NO: 542785 - RNA, 32 nt, Human
uugugugcaugaaagagaaagacugauuaccu

SEQ ID NO: 542786 - RNA, 17 nt, Human
uugugugccccacguca

SEQ ID NO: 542787 - RNA, 32 nt, Human
uugugugccuguagguacugugugucacugaa

SEQ ID NO: 542788 - RNA, 32 nt, Human
uugugugccuguagucccagcuacuuaggagg

SEQ ID NO: 542789 - RNA, 32 nt, Human
uugugugcuguugguugugguggaggaugugg

SEQ ID NO: 542790 - RNA, 21 nt, Human
uugugugcuuguuuugcgcua

SEQ ID NO: 542791 - RNA, 32 nt, Human
uuguguggcccaaucugaugggcuguuauaag

SEQ ID NO: 542792 - RNA, 32 nt, Human
uuguguggccuagaaguccucuguggucuccc

SEQ ID NO: 542793 - RNA, 32 nt, Human
uuguguggcugaagaggcaggaggaacagugu

SEQ ID NO: 542794 - RNA, 32 nt, Human
uuguguggcugcaaaacaucacaaagugaccg

SEQ ID NO: 542795 - RNA, 29 nt, Human
uuguguggcugcagugugccugggcccag

SEQ ID NO: 542796 - RNA, 32 nt, Human
uuguguggcuucaaacauuauggagaugucuu

SEQ ID NO: 542797 - RNA, 32 nt, Human
uuguguggggucaggucugacagaagaggagc

SEQ ID NO: 542798 - RNA, 32 nt, Human
uuguguggguggcacagaucugggcaguuaga

SEQ ID NO: 542799 - RNA, 32 nt, Human
uuguguggugggggcagccucugccucaaaaa

SEQ ID NO: 542800 - RNA, 32 nt, Human
uuguguguaccccgcuucugacugccuagggc

SEQ ID NO: 542801 - RNA, 32 nt, Human
uugugugucaugccagugagggacgucagacu

SEQ ID NO: 542802 - RNA, 32 nt, Human
uuguguguccaugcuggagaaaagccuuguua

SEQ ID NO: 542803 - RNA, 32 nt, Human
uugugugucucuguagaaaggcgaaggggcag

SEQ ID NO: 542804 - RNA, 32 nt, Human
uugugugucuucaggagaaugugcagugucuu

SEQ ID NO: 542805 - RNA, 32 nt, Human
uugugugugagagccccacagagcagguguug

SEQ ID NO: 542806 - RNA, 32 nt, Human
uugugugugcucugcuucaauguagucagaau

SEQ ID NO: 542807 - RNA, 31 nt, Human
uuguguguggcugguguaugggugagcaugc

SEQ ID NO: 542808 - RNA, 32 nt, Human
uuguguguuaacuucuagcugccuggggcugg

SEQ ID NO: 542809 - RNA, 32 nt, Human
uuguguuaaagugaauuagugugucagcuuaa

SEQ ID NO: 542810 - RNA, 32 nt, Human
uuguguuaaggcagaaauaauuaggcuagggc

SEQ ID NO: 542811 - RNA, 32 nt, Human
uuguguuaaugccacuucaagucauuauuugg

SEQ ID NO: 542812 - RNA, 32 nt, Human
uuguguuaccauuugaauacacugacuaaugu

SEQ ID NO: 542813 - RNA, 32 nt, Human
uuguguuaccuagcuggcuggguagcagugga

SEQ ID NO: 542814 - RNA, 32 nt, Human
uuguguuacucaucuuuauugucuccaugauu

SEQ ID NO: 542815 - RNA, 32 nt, Human
uuguguuagcagugccugggccugggccucag

SEQ ID NO: 542816 - RNA, 32 nt, Human
uuguguuaguuguaucugaaacuguuauguau

SEQ ID NO: 542817 - RNA, 32 nt, Human
uuguguuaucggacauucuaaugcauauuuau

SEQ ID NO: 542818 - RNA, 32 nt, Human
uuguguuaugccacuacucauguugucuuagg

SEQ ID NO: 542819 - RNA, 32 nt, Human
uuguguuauuucagaauaacuaaaguacuuca

SEQ ID NO: 542820 - RNA, 32 nt, Human
uuguguucacgauauucacuccugcccuccgu

SEQ ID NO: 542821 - RNA, 32 nt, Human
uuguguucagacacacacaucacagcuugacu

SEQ ID NO: 542822 - RNA, 32 nt, Human
uuguguucagggaugguuucauguagccacau

SEQ ID NO: 542823 - RNA, 32 nt, Human
uuguguuccccaggcugaagugcaguggcaug

SEQ ID NO: 542824 - RNA, 32 nt, Human
uuguguucccgugucugucugucuugcauccc

SEQ ID NO: 542825 - RNA, 32 nt, Human
uuguguuccucucccagcuccaucucuuuccc

SEQ ID NO: 542826 - RNA, 23 nt, Human
uuguguuccuuccuuuguguuca

SEQ ID NO: 542827 - RNA, 32 nt, Human
uuguguuccuugccccuguccaacccuggaca

SEQ ID NO: 542828 - RNA, 32 nt, Human
uuguguucucuuaaaauagaguuugaacaaau

SEQ ID NO: 542829 - RNA, 32 nt, Human
uuguguucuucccucuggcaauggcucccuuc

SEQ ID NO: 542830 - RNA, 24 nt, Human
uuguguucuuucuacuuuugggcu

SEQ ID NO: 542831 - RNA, 32 nt, Human
uuguguugcugauuuuucaguugaaaauguuu

SEQ ID NO: 542832 - RNA, 32 nt, Human
uuguguugggagaagcggcuggaguucauucu

SEQ ID NO: 542833 - RNA, 19 nt, Human
uuguguuguagucuagaca

SEQ ID NO: 542834 - RNA, 32 nt, Human
uuguguuguauugcauuuauuucccaaggccu

SEQ ID NO: 542835 - RNA, 32 nt, Human
uuguguugugaacaugaguuuuaugguauuuu

SEQ ID NO: 542836 - RNA, 32 nt, Human
uuguguuguuucuuaugacaauucugauuaga

SEQ ID NO: 542837 - RNA, 32 nt, Human
uuguguuuaaccuaaugcucagccuugguacu

SEQ ID NO: 542838 - RNA, 32 nt, Human
uuguguuuaacugcuacuuggagcucagaagc

SEQ ID NO: 542839 - RNA, 32 nt, Human
uuguguuuaauugcugcaaaagccacuuauua

SEQ ID NO: 542840 - RNA, 32 nt, Human
uuguguuuagagaauuaugggaaaccugguaa

SEQ ID NO: 542841 - RNA, 32 nt, Human
uuguguuuauauguucagaaccagaguagacu

SEQ ID NO: 542842 - RNA, 32 nt, Human
uuguguuucuaauacaggaucuggaaguagug

SEQ ID NO: 542843 - RNA, 32 nt, Human
uuguguuugcuacacugaccucuugcggucuu

SEQ ID NO: 542844 - RNA, 32 nt, Human
uuguguuuguagacaaaaggcaaagguauuau

SEQ ID NO: 542845 - RNA, 29 nt, Human
uuguguuuuaauaaacaauuugcagugac

SEQ ID NO: 542846 - RNA, 32 nt, Human
uuguguuuuauuugccaaauguuaccaaucag

SEQ ID NO: 542847 - RNA, 19 nt, Human
uuguguuuucuggcaccuu

SEQ ID NO: 542848 - RNA, 32 nt, Human
uuguguuuuguuuauccaugcuauagaacaag

SEQ ID NO: 542849 - RNA, 32 nt, Human
uuguguuuuucugcuuuugaaaucuguaucug

SEQ ID NO: 542850 - RNA, 32 nt, Human
uuguguuuuugucucauuguguuauugucuga

SEQ ID NO: 542851 - RNA, 32 nt, Human
uuguuaaaacauuuaauauuauauaggauauu

SEQ ID NO: 542852 - RNA, 32 nt, Human
uuguuaaaaguguagauuccaggccuccuuac

SEQ ID NO: 542853 - RNA, 32 nt, Human
uuguuaaacuauuauuauugaucacauuuuga

SEQ ID NO: 542854 - RNA, 32 nt, Human
uuguuaaacucauauauugaguuuuuaaauuu

SEQ ID NO: 542855 - RNA, 32 nt, Human
uuguuaaagcuauucuguagggcagagggcac

SEQ ID NO: 542856 - RNA, 32 nt, Human
uuguuaaauggagagaaaggcauggaaaaaug

SEQ ID NO: 542857 - RNA, 32 nt, Human
uuguuaaauuaaugccaaaauauuuuaauuuu

SEQ ID NO: 542858 - RNA, 32 nt, Human
uuguuaacaacaaggauaucucuucuggagua

SEQ ID NO: 542859 - RNA, 32 nt, Human
uuguuaaccauccucauauaccagggauaaau

SEQ ID NO: 542860 - RNA, 32 nt, Human
uuguuaacccagcgacgaacuuuccgaaaaau

SEQ ID NO: 542861 - RNA, 22 nt, Human
uuguuaacuaaaaacaguuugg

SEQ ID NO: 542862 - RNA, 32 nt, Human
uuguuaacuaaauuuaagguuuuguugaaccu

SEQ ID NO: 542863 - RNA, 32 nt, Human
uuguuaagaugacaaauggagagauggcaaga

SEQ ID NO: 542864 - RNA, 32 nt, Human
uuguuaagauggcuugaaaaguuucauuuuau

SEQ ID NO: 542865 - RNA, 30 nt, Human
uuguuaagccucucuguucagccuguuuua

SEQ ID NO: 542866 - RNA, 32 nt, Human
uuguuaagccuucugagggcagucuucuuuga

SEQ ID NO: 542867 - RNA, 32 nt, Human
uuguuaauaagugccaacuccuugugaaggcu

SEQ ID NO: 542868 - RNA, 32 nt, Human
uuguuaauagccacuauucuguugucuggaau

SEQ ID NO: 542869 - RNA, 32 nt, Human
uuguuaaucuaaaaucagcuugacuuaaucag

SEQ ID NO: 542870 - RNA, 32 nt, Human
uuguuaaucuguagcuuugccccagccacuuu

SEQ ID NO: 542871 - RNA, 32 nt, Human
uuguuaauucaaauaagcugauuuuaaugacg

SEQ ID NO: 542872 - RNA, 32 nt, Human
uuguuaauugcccucagccagcacuuuaggac

SEQ ID NO: 542873 - RNA, 32 nt, Human
uuguuaauuuguagcuuugccccagccacuuu

SEQ ID NO: 542874 - RNA, 32 nt, Human
uuguuaauuuugcucuauguuugccucugaag

SEQ ID NO: 542875 - RNA, 32 nt, Human
uuguuacaaucaaugaaccuacucugaaacau

SEQ ID NO: 542876 - RNA, 32 nt, Human
uuguuacagggccauuuacaccuauucacaaa

SEQ ID NO: 542877 - RNA, 31 nt, Human
uuguuacaguuucagguuauuuauauucgau

SEQ ID NO: 542878 - RNA, 32 nt, Human
uuguuacauauguauacaugugccauguuggu

SEQ ID NO: 542879 - RNA, 32 nt, Human
uuguuacauauguauacaugugccauguuugu

SEQ ID NO: 542880 - RNA, 32 nt, Human
uuguuacauuauagcuacauauuugugguuaa

SEQ ID NO: 542881 - RNA, 32 nt, Human
uuguuaccaaaaacaaaaccuggcagaugguc

SEQ ID NO: 542882 - RNA, 32 nt, Human
uuguuaccagccugggcaacauagugagaccc

SEQ ID NO: 542883 - RNA, 32 nt, Human
uuguuacccaggcaggagugcaguggcgugau

SEQ ID NO: 542884 - RNA, 24 nt, Human
uuguuacccaggcuggaguacagu

SEQ ID NO: 542885 - RNA, 32 nt, Human
uuguuacccaggcuggaguacaguggugucau

SEQ ID NO: 542886 - RNA, 32 nt, Human
uuguuacccaggcuggagugcaauggcacgca

SEQ ID NO: 542887 - RNA, 23 nt, Human
uuguuacccaggcuggagugcag

SEQ ID NO: 542888 - RNA, 24 nt, Human
uuguuacccaggcuggagugcagu

SEQ ID NO: 542889 - RNA, 32 nt, Human
uuguuacccaggcuggagugcaguggcacaau

SEQ ID NO: 542890 - RNA, 32 nt, Human
uuguuacccaggcuggagugcaguggcgcgau

SEQ ID NO: 542891 - RNA, 32 nt, Human
uuguuacccaggcuggagugcaguggcgugau

SEQ ID NO: 542892 - RNA, 32 nt, Human
uuguuacccccaccuaugccaggcugguacag

SEQ ID NO: 542893 - RNA, 32 nt, Human
uuguuaccccuugacagagcugcacccugaga

SEQ ID NO: 542894 - RNA, 19 nt, Human
uuguuaccgccguuuuuca

SEQ ID NO: 542895 - RNA, 32 nt, Human
uuguuacgagcaguuuuuccuggucaugguug

SEQ ID NO: 542896 - RNA, 32 nt, Human
uuguuacucauuuuauucacuaagcucgauaa

SEQ ID NO: 542897 - RNA, 32 nt, Human
uuguuacucauuuugaauauaccuuuuccuua

SEQ ID NO: 542898 - RNA, 32 nt, Human
uuguuacucucuggaagggaagguggaaaggg

SEQ ID NO: 542899 - RNA, 23 nt, Human
uuguuacugauucuccugucaga

SEQ ID NO: 542900 - RNA, 32 nt, Human
uuguuacuguccacccucauuucugccagcgc

SEQ ID NO: 542901 - RNA, 32 nt, Human
uuguuacuuagguauggagaggugggguuuuc

SEQ ID NO: 542902 - RNA, 31 nt, Human
uuguuacuucaauucuaucuguugaacuagg

SEQ ID NO: 542903 - RNA, 32 nt, Human
uuguuacuugcagcugaagauggaaagagcca

SEQ ID NO: 542904 - RNA, 23 nt, Human
uuguuacuuuaaacagaggcuga

SEQ ID NO: 542905 - RNA, 32 nt, Human
uuguuagacaauuuggccacuaacaucuccca

SEQ ID NO: 542906 - RNA, 32 nt, Human
uuguuagagacaccucagucgggccacaacug

SEQ ID NO: 542907 - RNA, 22 nt, Human
uuguuagagagcucugguuguu

SEQ ID NO: 542908 - RNA, 31 nt, Human
uuguuagaggaaggaacucuggcauucagag

SEQ ID NO: 542909 - RNA, 32 nt, Human
uuguuagcaaaaccaucucuugaguggagcuc

SEQ ID NO: 542910 - RNA, 32 nt, Human
uuguuagcagguuuguuuuuccugcuguugau

SEQ ID NO: 542911 - RNA, 24 nt, Human
uuguuagccgacuucugguagcuu

SEQ ID NO: 542912 - RNA, 32 nt, Human
uuguuagcgucccucugcauccaggcugaugg

SEQ ID NO: 542913 - RNA, 32 nt, Human
uuguuagcuacugccuguaggcauuuucagug

SEQ ID NO: 542914 - RNA, 32 nt, Human
uuguuagcuauaauuugaagaugaggaaacug

SEQ ID NO: 542915 - RNA, 32 nt, Human
uuguuagcuguucucagaaauguucuuucccu

SEQ ID NO: 542916 - RNA, 32 nt, Human
uuguuagcuuuuccuucuuucucuccagaaga

SEQ ID NO: 542917 - RNA, 32 nt, Human
uuguuaggaaugcagagucuaggccucacccu

SEQ ID NO: 542918 - RNA, 24 nt, Human
uuguuaggauguccugugcugcuu

SEQ ID NO: 542919 - RNA, 32 nt, Human
uuguuagggaggcaugauuuuggugagaucuu

SEQ ID NO: 542920 - RNA, 32 nt, Human
uuguuagucacaaauacuuagaacuggaaggc

SEQ ID NO: 542921 - RNA, 32 nt, Human
uuguuagucuacgccccacuguuuccacccau

SEQ ID NO: 542922 - RNA, 32 nt, Human
uuguuaguuaccacucaagagcagacagauau

SEQ ID NO: 542923 - RNA, 31 nt, Human
uuguuaguucacuucuuuuccacguucuucu

SEQ ID NO: 542924 - RNA, 21 nt, Human
uuguuaguugggaaagauuga

SEQ ID NO: 542925 - RNA, 32 nt, Human
uuguuauaugugcuuggcugggccaugggucc

SEQ ID NO: 542926 - RNA, 32 nt, Human
uuguuauauguguuuugcccugugccauucau

SEQ ID NO: 542927 - RNA, 32 nt, Human
uuguuauccaggcuggggugcaauggugcgau

SEQ ID NO: 542928 - RNA, 32 nt, Human
uuguuaucccacugcacucugcuuaaggguuc

SEQ ID NO: 542929 - RNA, 32 nt, Human
uuguuaucuagcugaaaacaaaugacaacuuu

SEQ ID NO: 542930 - RNA, 32 nt, Human
uuguuaucuuccaggugucuaaaucuccaguc

SEQ ID NO: 542931 - RNA, 32 nt, Human
uuguuauggggcuguuccaaaggagacacauc

SEQ ID NO: 542932 - RNA, 32 nt, Human
uuguuauguagugugcuuuuugucccuuuccu

SEQ ID NO: 542933 - RNA, 32 nt, Human
uuguuauguuuucgugcuuucucaucaaacca

SEQ ID NO: 542934 - RNA, 32 nt, Human
uuguuauuagguuuugguaacagcuguuguac

SEQ ID NO: 542935 - RNA, 32 nt, Human
uuguuauucauccuguguccucccucuucccg

SEQ ID NO: 542936 - RNA, 32 nt, Human
uuguuauugucucuuuuuaauuuuagccaucg

SEQ ID NO: 542937 - RNA, 32 nt, Human
uuguuauuuguuguuuuuaacaacuaaucaag

SEQ ID NO: 542938 - RNA, 32 nt, Human
uuguuauuuugaaagaguuucuuuuacugaga

SEQ ID NO: 542939 - RNA, 32 nt, Human
uuguucaaaaccuucaaaggcuucccaacuua

SEQ ID NO: 542940 - RNA, 32 nt, Human
uuguucaacacgccaagaaccuggacacucuu

SEQ ID NO: 542941 - RNA, 32 nt, Human
uuguucaauucaggugaggccugugaugacau

SEQ ID NO: 542942 - RNA, 32 nt, Human
uuguucacaaaaggauagagugugugcaucau

SEQ ID NO: 542943 - RNA, 32 nt, Human
uuguucacaaauucaagaagcuuaaaggucgu

SEQ ID NO: 542944 - RNA, 32 nt, Human
uuguucacacuuugcccuaugacauuucuaca

SEQ ID NO: 542945 - RNA, 25 nt, Human
uuguucacauacccaguaaugaaau

SEQ ID NO: 542946 - RNA, 32 nt, Human
uuguucacugcaaccucugccuuccaagauca

SEQ ID NO: 542947 - RNA, 32 nt, Human
uuguucagaaugucacgagccuuaugauauca

SEQ ID NO: 542948 - RNA, 32 nt, Human
uuguucagacugagcuuccugccugccuguac

SEQ ID NO: 542949 - RNA, 21 nt, Human
uuguucagacuggagugcagu

SEQ ID NO: 542950 - RNA, 22 nt, Human
uuguucagacuggagugcagug

SEQ ID NO: 542951 - RNA, 23 nt, Human
uuguucagacuggagugcagugg

SEQ ID NO: 542952 - RNA, 32 nt, Human
uuguucagaggcagagggugcaaaggagaaau

SEQ ID NO: 542953 - RNA, 32 nt, Human
uuguucagccacacuuugaggauucucuucag

SEQ ID NO: 542954 - RNA, 32 nt, Human
uuguucagcugcaugaauugagugaauaagaa

SEQ ID NO: 542955 - RNA, 32 nt, Human
uuguucagcugccucuuccagagcacacugau

SEQ ID NO: 542956 - RNA, 19 nt, Human
uuguucagcuguuuccaca

SEQ ID NO: 542957 - RNA, 32 nt, Human
uuguucaggccagccaacauacgacaguuuac

SEQ ID NO: 542958 - RNA, 32 nt, Human
uuguucagggagaagggggugcaggaggcaga

SEQ ID NO: 542959 - RNA, 21 nt, Human
uuguucagggguagcuuuuca

SEQ ID NO: 542960 - RNA, 32 nt, Human
uuguucagguauaaaugagcaguuaagauaua

SEQ ID NO: 542961 - RNA, 20 nt, Human
uuguucagguugcccuucac

SEQ ID NO: 542962 - RNA, 20 nt, Human
uuguucaguauaagcucguu

SEQ ID NO: 542963 - RNA, 32 nt, Human
uuguucagucagauuccucagcuauaaaaugc

SEQ ID NO: 542964 - RNA, 32 nt, Human
uuguucagugccugcggcuuuuccaggugcac

SEQ ID NO: 542965 - RNA, 21 nt, Human
uuguucagugucaccuuguca

SEQ ID NO: 542966 - RNA, 32 nt, Human
uuguucaucauuggcccucauuccaagcacuu

SEQ ID NO: 542967 - RNA, 32 nt, Human
uuguucaucccagccuccccauggcccucgcc

SEQ ID NO: 542968 - RNA, 31 nt, Human
uuguucaugauguaugugaugauggcuuacc

SEQ ID NO: 542969 - RNA, 32 nt, Human
uuguucauucucguaaccuccauauuuucagg

SEQ ID NO: 542970 - RNA, 32 nt, Human
uuguucauuuagaacugaguauucuggagaaa

SEQ ID NO: 542971 - RNA, 32 nt, Human
uuguucauuuccccucccuuagcuaccuucuu

SEQ ID NO: 542972 - RNA, 32 nt, Human
uuguucauuuguagcuuugccccagccacuuu

SEQ ID NO: 542973 - RNA, 32 nt, Human
uuguucauuugugccucagccauucuaguuuu

SEQ ID NO: 542974 - RNA, 32 nt, Human
uuguucauuuuaccucuuucuuacucuuacua

SEQ ID NO: 542975 - RNA, 32 nt, Human
uuguucauuuucagcacuuacuucaaaagaau

SEQ ID NO: 542976 - RNA, 21 nt, Human
uuguuccaacuucuccuugua

SEQ ID NO: 542977 - RNA, 32 nt, Human
uuguuccacgcaaaccagagugugucaguguu

SEQ ID NO: 542978 - RNA, 32 nt, Human
uuguuccacuccuccagcucugccuuagaaac

SEQ ID NO: 542979 - RNA, 32 nt, Human
uuguuccacugcaaauaaagccuuuuaaauca

SEQ ID NO: 542980 - RNA, 21 nt, Human
uuguuccagccaccuuuugca

SEQ ID NO: 542981 - RNA, 32 nt, Human
uuguuccagccucuucagacugugcaucuuuu

SEQ ID NO: 542982 - RNA, 32 nt, Human
uuguuccauggacauuaaaugagaccuuuucu

SEQ ID NO: 542983 - RNA, 32 nt, Human
uuguucccaaacaggauuaacugugaagacua

SEQ ID NO: 542984 - RNA, 32 nt, Human
uuguucccaagaaguguuuggaaugugcugua

SEQ ID NO: 542985 - RNA, 32 nt, Human
uuguucccagcaccugcugccucccagccuug

SEQ ID NO: 542986 - RNA, 24 nt, Human
uuguuccccaggcuggagugcaau

SEQ ID NO: 542987 - RNA, 32 nt, Human
uuguuccccaggcuggagugcaauggcacgau

SEQ ID NO: 542988 - RNA, 19 nt, Human
uuguucccccagccugcca

SEQ ID NO: 542989 - RNA, 32 nt, Human
uuguucccccuucacccuucucuguuaaccuu

SEQ ID NO: 542990 - RNA, 32 nt, Human
uuguucccccuucuacuuuuugcuucccugug

SEQ ID NO: 542991 - RNA, 32 nt, Human
uuguuccccucaggauccauagaguggacagu

SEQ ID NO: 542992 - RNA, 32 nt, Human
uuguucccucaccuauucauggcucucuuccu

SEQ ID NO: 542993 - RNA, 32 nt, Human
uuguucccucccucccugugcaugcaaacaag

SEQ ID NO: 542994 - RNA, 20 nt, Human
uuguucccugccauuuuuca

SEQ ID NO: 542995 - RNA, 32 nt, Human
uuguucccuggagaggcggagcugaauggccc

SEQ ID NO: 542996 - RNA, 32 nt, Human
uuguucccuggugucaaacuuugaaucuuugg

SEQ ID NO: 542997 - RNA, 32 nt, Human
uuguucccuguauccuaugggucuguuucuuu

SEQ ID NO: 542998 - RNA, 32 nt, Human
uuguuccuauuucuugcaccuucccauauuua

SEQ ID NO: 542999 - RNA, 25 nt, Human
uuguuccucaggaauagauuuuuca

SEQ ID NO: 543000 - RNA, 32 nt, Human
uuguuccuccuccuagcucucucccucagcca

SEQ ID NO: 543001 - RNA, 21 nt, Human
uuguuccucuguggcugaggu

SEQ ID NO: 543002 - RNA, 18 nt, Human
uuguuccugaugauuuca

SEQ ID NO: 543003 - RNA, 32 nt, Human
uuguuccugcauuaggggaaaguuggggacau

SEQ ID NO: 543004 - RNA, 32 nt, Human
uuguuccugcuguccccuccccuucaggcccc

SEQ ID NO: 543005 - RNA, 32 nt, Human
uuguuccugggaucgggcugaggccaggccuc

SEQ ID NO: 543006 - RNA, 32 nt, Human
uuguuccugugcaaauaaugaaagagcucggu

SEQ ID NO: 543007 - RNA, 32 nt, Human
uuguuccugugccguguggaccccagagcccc

SEQ ID NO: 543008 - RNA, 32 nt, Human
uuguuccuuacaucuuccaguuggaggugagu

SEQ ID NO: 543009 - RNA, 32 nt, Human
uuguuccuuauuagcuuuauuuuacuuuaugu

SEQ ID NO: 543010 - RNA, 32 nt, Human
uuguuccuucauuuucucugauuguuuuguuu

SEQ ID NO: 543011 - RNA, 32 nt, Human
uuguuccuucauuuucucuguuuuguuuuaga

SEQ ID NO: 543012 - RNA, 32 nt, Human
uuguuccuucuccauucccacugcuucacuug

SEQ ID NO: 543013 - RNA, 32 nt, Human
uuguuccuuuccccauccuuccuuccuucuug

SEQ ID NO: 543014 - RNA, 32 nt, Human
uuguucgacuguuucaaaacaugcuaauucca

SEQ ID NO: 543015 - RNA, 32 nt, Human
uuguucgcaccacugcaccacaacucaauaug

SEQ ID NO: 543016 - RNA, 19 nt, Human
uuguucgccgccgccgccg

SEQ ID NO: 543017 - RNA, 32 nt, Human
uuguucguccucccccacucccuccuaucguu

SEQ ID NO: 543018 - RNA, 32 nt, Human
uuguucguuuggauggaguuucguuuugucgc

SEQ ID NO: 543019 - RNA, 32 nt, Human
uuguucuaucuuguacagaaaacaguaaugga

SEQ ID NO: 543020 - RNA, 32 nt, Human
uuguucuaugcuaaaugcaucguuaggggagu

SEQ ID NO: 543021 - RNA, 32 nt, Human
uuguucucaccucuaccugucauuccagcauc

SEQ ID NO: 543022 - RNA, 32 nt, Human
uuguucucagcagucugauggaaggucucaaa

SEQ ID NO: 543023 - RNA, 32 nt, Human
uuguucucagcuucacagaggaagugaagcac

SEQ ID NO: 543024 - RNA, 32 nt, Human
uuguucuccaaagacccaaaaggcagauucac

SEQ ID NO: 543025 - RNA, 27 nt, Human
uuguucuccacucucaguaaaugaaau

SEQ ID NO: 543026 - RNA, 32 nt, Human
uuguucuccaucucaaaucuugaggagaagaa

SEQ ID NO: 543027 - RNA, 32 nt, Human
uuguucucccaaagugcugagauuacaggugu

SEQ ID NO: 543028 - RNA, 32 nt, Human
uuguucuccugguggagagagcuggaaggaag

SEQ ID NO: 543029 - RNA, 32 nt, Human
uuguucucugccccuuccuuccuuccuuccuu

SEQ ID NO: 543030 - RNA, 32 nt, Human
uuguucucuguuucgguuuuagcaggagagau

SEQ ID NO: 543031 - RNA, 32 nt, Human
uuguucucuuucuuauuguuuuucuaauuugu

SEQ ID NO: 543032 - RNA, 32 nt, Human
uuguucugagaacugacuuucuccccaucccc

SEQ ID NO: 543033 - RNA, 32 nt, Human
uuguucugagacauagcagugccuggcccagc

SEQ ID NO: 543034 - RNA, 32 nt, Human
uuguucugcgcagguuggagguagguggugag

SEQ ID NO: 543035 - RNA, 32 nt, Human
uuguucugcuucugcuuuaccucucaggacca

SEQ ID NO: 543036 - RNA, 32 nt, Human
uuguucuggaaaccaggauguucuauucuugg

SEQ ID NO: 543037 - RNA, 32 nt, Human
uuguucuggaaaccccagagagggcugggcuu

SEQ ID NO: 543038 - RNA, 32 nt, Human
uuguucugggagaagcuagggcgggucagagu

SEQ ID NO: 543039 - RNA, 32 nt, Human
uuguucugguuguagacugccaccuccucauu

SEQ ID NO: 543040 - RNA, 32 nt, Human
uuguucuguaccaugugggucucuccacagcg

SEQ ID NO: 543041 - RNA, 32 nt, Human
uuguucuguauauuuuaaugaucuuucacaag

SEQ ID NO: 543042 - RNA, 32 nt, Human
uuguucugucauggccagugggcaguuuguga

SEQ ID NO: 543043 - RNA, 32 nt, Human
uuguucugugcacuuguccaccccuguuaccc

SEQ ID NO: 543044 - RNA, 24 nt, Human
uuguucugugccuuuugccuggua

SEQ ID NO: 543045 - RNA, 32 nt, Human
uuguucugugugacccagcaaguggaaggaca

SEQ ID NO: 543046 - RNA, 32 nt, Human
uuguucuguugccugggcuggagugcaguggc

SEQ ID NO: 543047 - RNA, 23 nt, Human
uuguucuuaauaguagaaugaaa

SEQ ID NO: 543048 - RNA, 32 nt, Human
uuguucuuacucacucuucucauaaaauagga

SEQ ID NO: 543049 - RNA, 23 nt, Human
uuguucuuagucuuuuucuugua

SEQ ID NO: 543050 - RNA, 32 nt, Human
uuguucuucaaaguggaggucuccccugaucc

SEQ ID NO: 543051 - RNA, 32 nt, Human
uuguucuucccaaugucauauccaccaggacc

SEQ ID NO: 543052 - RNA, 19 nt, Human
uuguucuucccauuuuaca

SEQ ID NO: 543053 - RNA, 32 nt, Human
uuguucuuccuuccuuucuucccuccuccccc

SEQ ID NO: 543054 - RNA, 24 nt, Human
uuguucuuccuuuuuaauguaagu

SEQ ID NO: 543055 - RNA, 32 nt, Human
uuguucuucuucugcaguaucuggaaaaucug

SEQ ID NO: 543056 - RNA, 32 nt, Human
uuguucuugagugugucaaaauacagcuaguu

SEQ ID NO: 543057 - RNA, 32 nt, Human
uuguucuugggugcccuggagugaccccuacc

SEQ ID NO: 543058 - RNA, 32 nt, Human
uuguucuugguuuuguuucucgaucuuuuguu

SEQ ID NO: 543059 - RNA, 32 nt, Human
uuguucuuguugcccaggcugcagugcaaugg

SEQ ID NO: 543060 - RNA, 32 nt, Human
uuguucuuguugcccaggcuggaaugcaaugg

SEQ ID NO: 543061 - RNA, 21 nt, Human
uuguucuuugacagauuucca

SEQ ID NO: 543062 - RNA, 32 nt, Human
uuguucuuuggguccccugaugccauaggaga

SEQ ID NO: 543063 - RNA, 24 nt, Human
uuguucuuuuaguagcaaugaaau

SEQ ID NO: 543064 - RNA, 32 nt, Human
uuguugaagaaaagguaccagcuuuggaacga

SEQ ID NO: 543065 - RNA, 32 nt, Human
uuguugaaugauuaagucucuaaguaucuuaa

SEQ ID NO: 543066 - RNA, 32 nt, Human
uuguugaaugccaguuuugaccacagaagaau

SEQ ID NO: 543067 - RNA, 32 nt, Human
uuguugacaacaaaagaucauccaucgccuua

SEQ ID NO: 543068 - RNA, 32 nt, Human
uuguugacugggucaaagugaaggaauuucaa

SEQ ID NO: 543069 - RNA, 32 nt, Human
uuguugagaauggcugaacacacggccuacaa

SEQ ID NO: 543070 - RNA, 32 nt, Human
uuguugagcugcauuguguuaaaccaaauugu

SEQ ID NO: 543071 - RNA, 32 nt, Human
uuguugaggauccaugaccuucucccaugcau

SEQ ID NO: 543072 - RNA, 32 nt, Human
uuguugaggauucuggguugcagguaggcacc

SEQ ID NO: 543073 - RNA, 32 nt, Human
uuguugaggcuggaacuguuucuuuaaaaucc

SEQ ID NO: 543074 - RNA, 31 nt, Human
uuguugagugagagaauagaaaaagcgcuuu

SEQ ID NO: 543075 - RNA, 32 nt, Human
uuguugagugcaaauggagaacagcugcucac

SEQ ID NO: 543076 - RNA, 32 nt, Human
uuguugauauccacucucuucuuuccacuucc

SEQ ID NO: 543077 - RNA, 24 nt, Human
uuguugaugacauuuggguuguuu

SEQ ID NO: 543078 - RNA, 32 nt, Human
uuguugaugagcuauugagagcugcaguaguu

SEQ ID NO: 543079 - RNA, 32 nt, Human
uuguugaugaggcuggagugcaguggcgcgau

SEQ ID NO: 543080 - RNA, 32 nt, Human
uuguugauggcuuuaacagucaacacucuucu

SEQ ID NO: 543081 - RNA, 22 nt, Human
uuguugauucgucgccgaguca

SEQ ID NO: 543082 - RNA, 32 nt, Human
uuguugauuuaucaucuauuauuugaauucaa

SEQ ID NO: 543083 - RNA, 32 nt, Human
uuguugcaaaggaggaggaaaagggaggacuu

SEQ ID NO: 543084 - RNA, 32 nt, Human
uuguugcacuaccgcuguaucuguacauaauu

SEQ ID NO: 543085 - RNA, 32 nt, Human
uuguugcacuggcuaauguauuucuuauacag

SEQ ID NO: 543086 - RNA, 32 nt, Human
uuguugcagugggaagagaaggcacgacucug

SEQ ID NO: 543087 - RNA, 32 nt, Human
uuguugcaguguucaguuuccuugggggccug

SEQ ID NO: 543088 - RNA, 32 nt, Human
uuguugcauaucuguugccacucugaguuugg

SEQ ID NO: 543089 - RNA, 32 nt, Human
uuguugcauauuuaucccccuacccaucccuc

SEQ ID NO: 543090 - RNA, 32 nt, Human
uuguugccagcaccuuuagugcucagucuuca

SEQ ID NO: 543091 - RNA, 23 nt, Human
uuguugccaggcuggagugcagu

SEQ ID NO: 543092 - RNA, 24 nt, Human
uuguugccaggcuggagugcagug

SEQ ID NO: 543093 - RNA, 24 nt, Human
uuguugcccaaccuggagugcagu

SEQ ID NO: 543094 - RNA, 32 nt, Human
uuguugcccaaccuggagugcaguggugcggu

SEQ ID NO: 543095 - RNA, 22 nt, Human
uuguugcccaagcuggagugca

SEQ ID NO: 543096 - RNA, 24 nt, Human
uuguugcccaagcuggagugcaau

SEQ ID NO: 543097 - RNA, 32 nt, Human
uuguugcccaagcuggagugcaauggcacgau

SEQ ID NO: 543098 - RNA, 32 nt, Human
uuguugcccaagcuggagugcaauggcgcgau

SEQ ID NO: 543099 - RNA, 32 nt, Human
uuguugcccaagcuggagugcaguggcgcgau

SEQ ID NO: 543100 - RNA, 32 nt, Human
uuguugcccaagcuggagugcaguggugcaau

SEQ ID NO: 543101 - RNA, 32 nt, Human
uuguugcccacgcuggagugcaauggugcaau

SEQ ID NO: 543102 - RNA, 22 nt, Human
uuguugcccagacuggagugca

SEQ ID NO: 543103 - RNA, 24 nt, Human
uuguugcccagacuggagugcaau

SEQ ID NO: 543104 - RNA, 32 nt, Human
uuguugcccagacuggagugcaauggcacacg

SEQ ID NO: 543105 - RNA, 24 nt, Human
uuguugcccagacuggagugcagu

SEQ ID NO: 543106 - RNA, 32 nt, Human
uuguugcccagacuggagugcaguggcauaau

SEQ ID NO: 543107 - RNA, 22 nt, Human
uuguugcccagccuggagugca

SEQ ID NO: 543108 - RNA, 32 nt, Human
uuguugcccagccuggagugcaauagcgugau

SEQ ID NO: 543109 - RNA, 32 nt, Human
uuguugcccagccuggccaacauggugaaacc

SEQ ID NO: 543110 - RNA, 32 nt, Human
uuguugcccaggaagagacggaggaugcaaau

SEQ ID NO: 543111 - RNA, 32 nt, Human
uuguugcccaggccagagugcaauggcgugau

SEQ ID NO: 543112 - RNA, 21 nt, Human
uuguugcccaggcggaguaca

SEQ ID NO: 543113 - RNA, 32 nt, Human
uuguugcccaggcggagugcaguggaacaacc

SEQ ID NO: 543114 - RNA, 32 nt, Human
uuguugcccaggcuagagggcaauggugcaau

SEQ ID NO: 543115 - RNA, 22 nt, Human
uuguugcccaggcuagagugca

SEQ ID NO: 543116 - RNA, 24 nt, Human
uuguugcccaggcuagagugcaau

SEQ ID NO: 543117 - RNA, 32 nt, Human
uuguugcccaggcuagagugcaauggcacaau

SEQ ID NO: 543118 - RNA, 32 nt, Human
uuguugcccaggcuagagugcaauggcaugau

SEQ ID NO: 543119 - RNA, 32 nt, Human
uuguugcccaggcuagagugcaauggcgccau

SEQ ID NO: 543120 - RNA, 22 nt, Human
uuguugcccaggcuagcaugca

SEQ ID NO: 543121 - RNA, 24 nt, Human
uuguugcccaggcuagcaugcaau

SEQ ID NO: 543122 - RNA, 32 nt, Human
uuguugcccaggcuagcaugcaauggugugac

SEQ ID NO: 543123 - RNA, 32 nt, Human
uuguugcccaggcugaagugaucucggcucac

SEQ ID NO: 543124 - RNA, 21 nt, Human
uuguugcccaggcugaagugc

SEQ ID NO: 543125 - RNA, 22 nt, Human
uuguugcccaggcugaagugca

SEQ ID NO: 543126 - RNA, 24 nt, Human
uuguugcccaggcugaagugcaau

SEQ ID NO: 543127 - RNA, 32 nt, Human
uuguugcccaggcugaagugcaauguugugau

SEQ ID NO: 543128 - RNA, 23 nt, Human
uuguugcccaggcugaagugcag

SEQ ID NO: 543129 - RNA, 24 nt, Human
uuguugcccaggcugaagugcagu

SEQ ID NO: 543130 - RNA, 32 nt, Human
uuguugcccaggcugaagugcaguguugugau

SEQ ID NO: 543131 - RNA, 32 nt, Human
uuguugcccaggcugcagugcaauggcacaau

SEQ ID NO: 543132 - RNA, 32 nt, Human
uuguugcccaggcuggaaauggcgcgaucucg

SEQ ID NO: 543133 - RNA, 22 nt, Human
uuguugcccaggcuggaaugca

SEQ ID NO: 543134 - RNA, 24 nt, Human
uuguugcccaggcuggaaugcaau

SEQ ID NO: 543135 - RNA, 32 nt, Human
uuguugcccaggcuggaaugcaauggcgcgau

SEQ ID NO: 543136 - RNA, 32 nt, Human
uuguugcccaggcuggaaugcaauggcgugau

SEQ ID NO: 543137 - RNA, 23 nt, Human
uuguugcccaggcuggaaugcag

SEQ ID NO: 543138 - RNA, 24 nt, Human
uuguugcccaggcuggaaugcagu

SEQ ID NO: 543139 - RNA, 32 nt, Human
uuguugcccaggcuggaaugcaguggcacgau

SEQ ID NO: 543140 - RNA, 24 nt, Human
uuguugcccaggcuggagcgcagu

SEQ ID NO: 543141 - RNA, 32 nt, Human
uuguugcccaggcuggagcgcaguggggugau

SEQ ID NO: 543142 - RNA, 24 nt, Human
uuguugcccaggcuggagggcaau

SEQ ID NO: 543143 - RNA, 32 nt, Human
uuguugcccaggcuggagggcaauggugcaau

SEQ ID NO: 543144 - RNA, 22 nt, Human
uuguugcccaggcuggaguaca

SEQ ID NO: 543145 - RNA, 24 nt, Human
uuguugcccaggcuggaguacaau

SEQ ID NO: 543146 - RNA, 32 nt, Human
uuguugcccaggcuggaguacaauggcaugau

SEQ ID NO: 543147 - RNA, 32 nt, Human
uuguugcccaggcuggaguacaauggcgcgau

SEQ ID NO: 543148 - RNA, 32 nt, Human
uuguugcccaggcuggaguacaauggcgugau

SEQ ID NO: 543149 - RNA, 32 nt, Human
uuguugcccaggcuggaguacaauggugcgau

SEQ ID NO: 543150 - RNA, 23 nt, Human
uuguugcccaggcuggaguacag

SEQ ID NO: 543151 - RNA, 24 nt, Human
uuguugcccaggcuggaguacagu

SEQ ID NO: 543152 - RNA, 32 nt, Human
uuguugcccaggcuggaguacagugguaugau

SEQ ID NO: 543153 - RNA, 20 nt, Human
uuguugcccaggcuggagug

SEQ ID NO: 543154 - RNA, 32 nt, Human
uuguugcccaggcuggagugaaauggugcgau

SEQ ID NO: 543155 - RNA, 32 nt, Human
uuguugcccaggcuggagugaaguggcgugac

SEQ ID NO: 543156 - RNA, 32 nt, Human
uuguugcccaggcuggagugaguggcacaguc

SEQ ID NO: 543157 - RNA, 22 nt, Human
uuguugcccaggcuggagugca

SEQ ID NO: 543158 - RNA, 23 nt, Human
uuguugcccaggcuggagugcaa

SEQ ID NO: 543159 - RNA, 32 nt, Human
uuguugcccaggcuggagugcaacggcacgau

SEQ ID NO: 543160 - RNA, 32 nt, Human
uuguugcccaggcuggagugcaacggcaugau

SEQ ID NO: 543161 - RNA, 32 nt, Human
uuguugcccaggcuggagugcaacggcgcgcu

SEQ ID NO: 543162 - RNA, 32 nt, Human
uuguugcccaggcuggagugcaacggugcagu

SEQ ID NO: 543163 - RNA, 24 nt, Human
uuguugcccaggcuggagugcaau

SEQ ID NO: 543164 - RNA, 32 nt, Human
uuguugcccaggcuggagugcaauagcacgau

SEQ ID NO: 543165 - RNA, 32 nt, Human
uuguugcccaggcuggagugcaauagcaugau

SEQ ID NO: 543166 - RNA, 32 nt, Human
uuguugcccaggcuggagugcaauagcgcaau

SEQ ID NO: 543167 - RNA, 32 nt, Human
uuguugcccaggcuggagugcaauagcgcgau

SEQ ID NO: 543168 - RNA, 32 nt, Human
uuguugcccaggcuggagugcaaugacacgau

SEQ ID NO: 543169 - RNA, 32 nt, Human
uuguugcccaggcuggagugcaaugaugcaau

SEQ ID NO: 543170 - RNA, 32 nt, Human
uuguugcccaggcuggagugcaaugcgcgauc

SEQ ID NO: 543171 - RNA, 32 nt, Human
uuguugcccaggcuggagugcaauggagcgau

SEQ ID NO: 543172 - RNA, 32 nt, Human
uuguugcccaggcuggagugcaauggcacaac

SEQ ID NO: 543173 - RNA, 32 nt, Human
uuguugcccaggcuggagugcaauggcacaau

SEQ ID NO: 543174 - RNA, 32 nt, Human
uuguugcccaggcuggagugcaauggcaccau

SEQ ID NO: 543175 - RNA, 32 nt, Human
uuguugcccaggcuggagugcaauggcacgau

SEQ ID NO: 543176 - RNA, 32 nt, Human
uuguugcccaggcuggagugcaauggcauaau

SEQ ID NO: 543177 - RNA, 32 nt, Human
uuguugcccaggcuggagugcaauggcaugau

SEQ ID NO: 543178 - RNA, 32 nt, Human
uuguugcccaggcuggagugcaauggcgcaau

SEQ ID NO: 543179 - RNA, 32 nt, Human
uuguugcccaggcuggagugcaauggcgcgaa

SEQ ID NO: 543180 - RNA, 32 nt, Human
uuguugcccaggcuggagugcaauggcgcgau

SEQ ID NO: 543181 - RNA, 32 nt, Human
uuguugcccaggcuggagugcaauggcguaau

SEQ ID NO: 543182 - RNA, 32 nt, Human
uuguugcccaggcuggagugcaauggcguauc

SEQ ID NO: 543183 - RNA, 32 nt, Human
uuguugcccaggcuggagugcaauggcgugau

SEQ ID NO: 543184 - RNA, 32 nt, Human
uuguugcccaggcuggagugcaaugguacaau

SEQ ID NO: 543185 - RNA, 32 nt, Human
uuguugcccaggcuggagugcaaugguaugau

SEQ ID NO: 543186 - RNA, 32 nt, Human
uuguugcccaggcuggagugcaauggugcaau

SEQ ID NO: 543187 - RNA, 32 nt, Human
uuguugcccaggcuggagugcaauggugcagu

SEQ ID NO: 543188 - RNA, 32 nt, Human
uuguugcccaggcuggagugcaauggugcgau

SEQ ID NO: 543189 - RNA, 23 nt, Human
uuguugcccaggcuggagugcag

SEQ ID NO: 543190 - RNA, 24 nt, Human
uuguugcccaggcuggagugcagu

SEQ ID NO: 543191 - RNA, 32 nt, Human
uuguugcccaggcuggagugcaguagcacgau

SEQ ID NO: 543192 - RNA, 32 nt, Human
uuguugcccaggcuggagugcaguagcacuau

SEQ ID NO: 543193 - RNA, 32 nt, Human
uuguugcccaggcuggagugcagugacacaau

SEQ ID NO: 543194 - RNA, 32 nt, Human
uuguugcccaggcuggagugcaguggcacgau

SEQ ID NO: 543195 - RNA, 32 nt, Human
uuguugcccaggcuggagugcaguggcgccau

SEQ ID NO: 543196 - RNA, 32 nt, Human
uuguugcccaggcuggagugcaguggcgugau

SEQ ID NO: 543197 - RNA, 32 nt, Human
uuguugcccaggcuggagugcaguggucugau

SEQ ID NO: 543198 - RNA, 32 nt, Human
uuguugcccaggcuggagugcaguggugcaau

SEQ ID NO: 543199 - RNA, 32 nt, Human
uuguugcccaggcuggagugcaguggugcgau

SEQ ID NO: 543200 - RNA, 32 nt, Human
uuguugcccaggcuggagugcaguggugugau

SEQ ID NO: 543201 - RNA, 32 nt, Human
uuguugcccaggcuggagugcauuggcgcgau

SEQ ID NO: 543202 - RNA, 32 nt, Human
uuguugcccaggcuggagugccuuggcgcgau

SEQ ID NO: 543203 - RNA, 24 nt, Human
uuguugcccaggcuggagugcggu

SEQ ID NO: 543204 - RNA, 32 nt, Human
uuguugcccaggcuggagugcgguggcgugau

SEQ ID NO: 543205 - RNA, 32 nt, Human
uuguugcccaggcuggagugcggugguacaau

SEQ ID NO: 543206 - RNA, 32 nt, Human
uuguugcccaggcuggagugcgguggugcaau

SEQ ID NO: 543207 - RNA, 32 nt, Human
uuguugcccaggcuggagugcguuggcguggu

SEQ ID NO: 543208 - RNA, 32 nt, Human
uuguugcccaggcuggaguggaguggcgugau

SEQ ID NO: 543209 - RNA, 32 nt, Human
uuguugcccaggcuggaguguaguggcgcgau

SEQ ID NO: 543210 - RNA, 32 nt, Human
uuguugcccaggcuggagugugaugggcucga

SEQ ID NO: 543211 - RNA, 32 nt, Human
uuguugcccaggcuggagugugguggggcaau

SEQ ID NO: 543212 - RNA, 32 nt, Human
uuguugcccaggcuggaguucaguggcgugau

SEQ ID NO: 543213 - RNA, 32 nt, Human
uuguugcccaggcugggagggcaauggcaccg

SEQ ID NO: 543214 - RNA, 32 nt, Human
uuguugcccaggcuggggugcaguggcacgau

SEQ ID NO: 543215 - RNA, 24 nt, Human
uuguugcccaggcuggugugcaau

SEQ ID NO: 543216 - RNA, 32 nt, Human
uuguugcccaggcuggugugcaauggcgugau

SEQ ID NO: 543217 - RNA, 22 nt, Human
uuguugcccaggcuguaguaca

SEQ ID NO: 543218 - RNA, 24 nt, Human
uuguugcccaggcuguaguacaau

SEQ ID NO: 543219 - RNA, 32 nt, Human
uuguugcccaggcuguaguacaauggcaugau

SEQ ID NO: 543220 - RNA, 23 nt, Human
uuguugcccaggcuugagugcag

SEQ ID NO: 543221 - RNA, 32 nt, Human
uuguugcccaggcuugagugcagugaugcaau

SEQ ID NO: 543222 - RNA, 32 nt, Human
uuguugcccagggcuggagugcaguggcauga

SEQ ID NO: 543223 - RNA, 23 nt, Human
uuguugcccagguuagagugcag

SEQ ID NO: 543224 - RNA, 24 nt, Human
uuguugcccagguuagagugcagu

SEQ ID NO: 543225 - RNA, 32 nt, Human
uuguugccccacacagccuccugcugcaggug

SEQ ID NO: 543226 - RNA, 32 nt, Human
uuguugcccgggcuggaaugcaauggcgcgau

SEQ ID NO: 543227 - RNA, 22 nt, Human
uuguugcccgggcuggagugca

SEQ ID NO: 543228 - RNA, 32 nt, Human
uuguugcccgggcuggagugcaauggcgcgaa

SEQ ID NO: 543229 - RNA, 32 nt, Human
uuguugcccgggcuggagugcaauggugagau

SEQ ID NO: 543230 - RNA, 32 nt, Human
uuguugccgaaacuguuuauggccuucuuguu

SEQ ID NO: 543231 - RNA, 32 nt, Human
uuguugccgaggcuggagugcaauggcgcaac

SEQ ID NO: 543232 - RNA, 22 nt, Human
uuguugccuaggcuggagugca

SEQ ID NO: 543233 - RNA, 24 nt, Human
uuguugccuaggcuggagugcaau

SEQ ID NO: 543234 - RNA, 32 nt, Human
uuguugccuaggcuggagugcaauggcgagau

SEQ ID NO: 543235 - RNA, 32 nt, Human
uuguugccuaggcuggagugcaauggugcgau

SEQ ID NO: 543236 - RNA, 24 nt, Human
uuguugccuaggcuggagugcagu

SEQ ID NO: 543237 - RNA, 32 nt, Human
uuguugccuaggcuggagugcaguggcgcagu

SEQ ID NO: 543238 - RNA, 32 nt, Human
uuguugccucuccugcuucuucauacagagug

SEQ ID NO: 543239 - RNA, 32 nt, Human
uuguugccuuucuuccaagccauggccaugcc

SEQ ID NO: 543240 - RNA, 32 nt, Human
uuguugcgcaggcuggagugcaauggugcaau

SEQ ID NO: 543241 - RNA, 32 nt, Human
uuguugcuaugagucaaggaguguaaccuucu

SEQ ID NO: 543242 - RNA, 32 nt, Human
uuguugcucaggcuggaguacaguggcauaau

SEQ ID NO: 543243 - RNA, 19 nt, Human
uuguugcucccaccgaguu

SEQ ID NO: 543244 - RNA, 17 nt, Human
uuguugcucgcccggcc

SEQ ID NO: 543245 - RNA, 18 nt, Human
uuguugcucguagagcca

SEQ ID NO: 543246 - RNA, 17 nt, Human
uuguugcucguccugcc

SEQ ID NO: 543247 - RNA, 32 nt, Human
uuguugcugaggcuggagugcaguggcaccau

SEQ ID NO: 543248 - RNA, 32 nt, Human
uuguugcugcugcugcucauuccacacuguug

SEQ ID NO: 543249 - RNA, 22 nt, Human
uuguugcugcuucucuagugga

SEQ ID NO: 543250 - RNA, 32 nt, Human
uuguugcuggccccagcgccuggugcaggaag

SEQ ID NO: 543251 - RNA, 19 nt, Human
uuguugcuggcccugggcu

SEQ ID NO: 543252 - RNA, 32 nt, Human
uuguugcuuaggaugaggagacucuguaauuu

SEQ ID NO: 543253 - RNA, 32 nt, Human
uuguugcuucauugcuaguuuguauuucuaac

SEQ ID NO: 543254 - RNA, 32 nt, Human
uuguugcuuuggaauagauggagcugccccag

SEQ ID NO: 543255 - RNA, 32 nt, Human
uuguuggaacacaaaugaugcuagagguugug

SEQ ID NO: 543256 - RNA, 24 nt, Human
uuguuggacuccagcuuugagcca

SEQ ID NO: 543257 - RNA, 32 nt, Human
uuguuggacuccuauucaugcuucaaagucca

SEQ ID NO: 543258 - RNA, 32 nt, Human
uuguuggagcaagaggagaaguugcuggagca

SEQ ID NO: 543259 - RNA, 32 nt, Human
uuguuggauugugcuguuugggagaggugaca

SEQ ID NO: 543260 - RNA, 32 nt, Human
uuguuggccggaucaccaucugaagagcagac

SEQ ID NO: 543261 - RNA, 20 nt, Human
uuguuggccgggugcagugg

SEQ ID NO: 543262 - RNA, 32 nt, Human
uuguuggcuaggcuggaguaaaauggugcgau

SEQ ID NO: 543263 - RNA, 32 nt, Human
uuguuggcucacagcaaggccuuuucacagag

SEQ ID NO: 543264 - RNA, 32 nt, Human
uuguuggcuuaucuucauaaauaauuugucug

SEQ ID NO: 543265 - RNA, 32 nt, Human
uuguugggaggaggaggaaagggaaggcuggc

SEQ ID NO: 543266 - RNA, 32 nt, Human
uuguugggaggccaaagcaggaggauagcuug

SEQ ID NO: 543267 - RNA, 32 nt, Human
uuguugggagucaagugacagagcagaccugg

SEQ ID NO: 543268 - RNA, 32 nt, Human
uuguugggaugggguuuugcgauguugcccag

SEQ ID NO: 543269 - RNA, 32 nt, Human
uuguugggcagcagaaaaccaccaaaguuaag

SEQ ID NO: 543270 - RNA, 32 nt, Human
uuguugggccuuucuguuguuucuuuguuuuc

SEQ ID NO: 543271 - RNA, 32 nt, Human
uuguuggggagagaggcagaggcagcuggagc

SEQ ID NO: 543272 - RNA, 32 nt, Human
uuguuggggccagaaauguccacguccugagc

SEQ ID NO: 543273 - RNA, 32 nt, Human
uuguuggguaacucagccauggagaugccaag

SEQ ID NO: 543274 - RNA, 24 nt, Human
uuguugggucucucuguguuguuu

SEQ ID NO: 543275 - RNA, 32 nt, Human
uuguuggguuaaauguucauggucaacuccaa

SEQ ID NO: 543276 - RNA, 32 nt, Human
uuguuggguuuugagcaggcuguuauagugag

SEQ ID NO: 543277 - RNA, 32 nt, Human
uuguuggugaaauaugucgaggaccagaugcu

SEQ ID NO: 543278 - RNA, 32 nt, Human
uuguuggugaggaaauuaauuaugacuugaua

SEQ ID NO: 543279 - RNA, 23 nt, Human
uuguuggugcucuuccggcugcu

SEQ ID NO: 543280 - RNA, 32 nt, Human
uuguuggugggaguggucuccggaggccuccc

SEQ ID NO: 543281 - RNA, 32 nt, Human
uuguugguucuuggaccccauuuugcaccuau

SEQ ID NO: 543282 - RNA, 32 nt, Human
uuguugguugugcuucugccucuggacgccgc

SEQ ID NO: 543283 - RNA, 32 nt, Human
uuguuguaaaacugaaucaugucagaacugcu

SEQ ID NO: 543284 - RNA, 32 nt, Human
uuguuguaaagacauuguuuuucagacuuuuc

SEQ ID NO: 543285 - RNA, 32 nt, Human
uuguuguauagaacaguuuuuaggcagccuuu

SEQ ID NO: 543286 - RNA, 32 nt, Human
uuguuguauuuuuaguagagacaggguuucac

SEQ ID NO: 543287 - RNA, 32 nt, Human
uuguugucauuuguaacaggucacuuccuuuu

SEQ ID NO: 543288 - RNA, 32 nt, Human
uuguuguccaggcuagagugcaauggcaugau

SEQ ID NO: 543289 - RNA, 22 nt, Human
uuguuguccaggcuggagugca

SEQ ID NO: 543290 - RNA, 24 nt, Human
uuguuguccaggcuggagugcaau

SEQ ID NO: 543291 - RNA, 32 nt, Human
uuguuguccaggcuggagugcaauggcacgau

SEQ ID NO: 543292 - RNA, 32 nt, Human
uuguuguccaggcuggagugcaauggcgcaau

SEQ ID NO: 543293 - RNA, 23 nt, Human
uuguuguccaggcuggagugcag

SEQ ID NO: 543294 - RNA, 24 nt, Human
uuguuguccaggcuggagugcagu

SEQ ID NO: 543295 - RNA, 32 nt, Human
uuguuguccaggcuggagugcaguggcgcgau

SEQ ID NO: 543296 - RNA, 22 nt, Human
uuguuguccagucuggagugca

SEQ ID NO: 543297 - RNA, 24 nt, Human
uuguuguccagucuggagugcaau

SEQ ID NO: 543298 - RNA, 32 nt, Human
uuguuguccagucuggagugcaauggcacaau

SEQ ID NO: 543299 - RNA, 32 nt, Human
uuguugucuaggcuggagugccguggugcgau

SEQ ID NO: 543300 - RNA, 32 nt, Human
uuguugucucuuccucuucagaacucuugucc

SEQ ID NO: 543301 - RNA, 32 nt, Human
uuguugugaaacacugcuuccugaaacuuccu

SEQ ID NO: 543302 - RNA, 32 nt, Human
uuguugugaagccagacagugaccucaaaugu

SEQ ID NO: 543303 - RNA, 32 nt, Human
uuguugugagccccuguccuucuuaguugucc

SEQ ID NO: 543304 - RNA, 32 nt, Human
uuguuguggagaauugggacaggcagagccag

SEQ ID NO: 543305 - RNA, 32 nt, Human
uuguuguggauuccagugaugaagagagaaug

SEQ ID NO: 543306 - RNA, 32 nt, Human
uuguuguggcucuuuuugucugugccaguugg

SEQ ID NO: 543307 - RNA, 32 nt, Human
uuguuguguaacaaaccaccccaaaacuuacu

SEQ ID NO: 543308 - RNA, 29 nt, Human
uuguugugucugugcuaaccugggaacug

SEQ ID NO: 543309 - RNA, 32 nt, Human
uuguuguguucuguugaaggugccauuuuaaa

SEQ ID NO: 543310 - RNA, 32 nt, Human
uuguuguucaagaacauaagcaaccaguagcu

SEQ ID NO: 543311 - RNA, 18 nt, Human
uuguuguucacugggcca

SEQ ID NO: 543312 - RNA, 32 nt, Human
uuguuguucucaggacuucugggcauggcagu

SEQ ID NO: 543313 - RNA, 32 nt, Human
uuguuguucucgggaaggcgguugcagcacuc

SEQ ID NO: 543314 - RNA, 32 nt, Human
uuguuguugcagaaacugugucagaggaauaa

SEQ ID NO: 543315 - RNA, 19 nt, Human
uuguuguugcccagagcca

SEQ ID NO: 543316 - RNA, 20 nt, Human
uuguuguuguuuuugggcca

SEQ ID NO: 543317 - RNA, 32 nt, Human
uuguuguuuaaauaccuaucacugugguagag

SEQ ID NO: 543318 - RNA, 32 nt, Human
uuguuguuucccucugaggcuugcaaagaagg

SEQ ID NO: 543319 - RNA, 32 nt, Human
uuguuguuuccuuuugagauggagucuugcuc

SEQ ID NO: 543320 - RNA, 32 nt, Human
uuguuguuugagauagagucuugcuaguguca

SEQ ID NO: 543321 - RNA, 32 nt, Human
uuguuguuugagauagagucuugcuaguguug

SEQ ID NO: 543322 - RNA, 18 nt, Human
uuguuguuugccaagcua

SEQ ID NO: 543323 - RNA, 32 nt, Human
uuguuguuuguugacagcuuggaaagggaaga

SEQ ID NO: 543324 - RNA, 32 nt, Human
uuguuguuuugagacagggucuugcccuguug

SEQ ID NO: 543325 - RNA, 32 nt, Human
uuguuguuuuucuguguuguuuucccuggaug

SEQ ID NO: 543326 - RNA, 32 nt, Human
uuguuuaaauggagacuuccaaucaccagcuc

SEQ ID NO: 543327 - RNA, 32 nt, Human
uuguuuaaccauuuaccuuauucucaguuuuu

SEQ ID NO: 543328 - RNA, 32 nt, Human
uuguuuaaggagguggggcgcguuucaguggc

SEQ ID NO: 543329 - RNA, 32 nt, Human
uuguuuaaucaucauggugguccuaccuggau

SEQ ID NO: 543330 - RNA, 32 nt, Human
uuguuuaaugucucucugaaugcaguuuuaaa

SEQ ID NO: 543331 - RNA, 32 nt, Human
uuguuuaauuccugauuuuaaagccugcucua

SEQ ID NO: 543332 - RNA, 32 nt, Human
uuguuuacacauuuccuguuguacauuuaggu

SEQ ID NO: 543333 - RNA, 32 nt, Human
uuguuuaccaaggaguauugucaguguuuugu

SEQ ID NO: 543334 - RNA, 32 nt, Human
uuguuuagaaguucggaccaacagaaaaaugc

SEQ ID NO: 543335 - RNA, 32 nt, Human
uuguuuagacuuuuauuuauacucuucugauu

SEQ ID NO: 543336 - RNA, 32 nt, Human
uuguuuagcaucuucuuuaccuccaguguucc

SEQ ID NO: 543337 - RNA, 32 nt, Human
uuguuuagcuggugagggaagagggugggcaa

SEQ ID NO: 543338 - RNA, 32 nt, Human
uuguuuagggccugggaauuggccauguguua

SEQ ID NO: 543339 - RNA, 32 nt, Human
uuguuuaguccugcaagacugaugcuuaauac

SEQ ID NO: 543340 - RNA, 32 nt, Human
uuguuuaguuauuguuucuauuucucauacau

SEQ ID NO: 543341 - RNA, 32 nt, Human
uuguuuaguuuuuacuugggugcaauguguac

SEQ ID NO: 543342 - RNA, 32 nt, Human
uuguuuauacaguuuguauaggcugacuucug

SEQ ID NO: 543343 - RNA, 32 nt, Human
uuguuuauauuagacaaugcucugugaauauu

SEQ ID NO: 543344 - RNA, 25 nt, Human
uuguuuaucaguucaaaaaugcucu

SEQ ID NO: 543345 - RNA, 32 nt, Human
uuguuuaucuuucuguucaucuauucugucua

SEQ ID NO: 543346 - RNA, 32 nt, Human
uuguuuauggccaguuuuggggccaguuuaug

SEQ ID NO: 543347 - RNA, 32 nt, Human
uuguuuaugguuguguaccuacuuugagaaga

SEQ ID NO: 543348 - RNA, 32 nt, Human
uuguuuauuugccaacacaaguuuacauauau

SEQ ID NO: 543349 - RNA, 32 nt, Human
uuguuucaaauaccuuucucaacauaaaagga

SEQ ID NO: 543350 - RNA, 32 nt, Human
uuguuucaaauguuaauuuacauaggauuuuu

SEQ ID NO: 543351 - RNA, 32 nt, Human
uuguuucacuuugacauuuggggaucuggugg

SEQ ID NO: 543352 - RNA, 32 nt, Human
uuguuucagcagcuuugguugcacugaauuug

SEQ ID NO: 543353 - RNA, 24 nt, Human
uuguuucaguagcccauguacuaa

SEQ ID NO: 543354 - RNA, 32 nt, Human
uuguuucagugucauuuuaaauguuuucuugu

SEQ ID NO: 543355 - RNA, 32 nt, Human
uuguuucauuucuggagacuguaugcaucacu

SEQ ID NO: 543356 - RNA, 32 nt, Human
uuguuuccagcuaauuauugugguguacuaua

SEQ ID NO: 543357 - RNA, 32 nt, Human
uuguuuccaggagcauagaagccacaucguug

SEQ ID NO: 543358 - RNA, 24 nt, Human
uuguuucccaggcuggagugcaau

SEQ ID NO: 543359 - RNA, 32 nt, Human
uuguuucccaggcuggagugcaauggcacaau

SEQ ID NO: 543360 - RNA, 32 nt, Human
uuguuucccaggcuggagugcaaugggugauc

SEQ ID NO: 543361 - RNA, 32 nt, Human
uuguuucccaggcuggagugcaguggcacgau

SEQ ID NO: 543362 - RNA, 32 nt, Human
uuguuucccaggcuggggugggggccugagca

SEQ ID NO: 543363 - RNA, 32 nt, Human
uuguuucccucccagccccaaaccuuuuguuc

SEQ ID NO: 543364 - RNA, 32 nt, Human
uuguuucccuucacuuucagucuuccacacac

SEQ ID NO: 543365 - RNA, 32 nt, Human
uuguuucccuuuccuuucuccaguccacgugu

SEQ ID NO: 543366 - RNA, 32 nt, Human
uuguuuccucaccacuuuucccuuaauucuaa

SEQ ID NO: 543367 - RNA, 32 nt, Human
uuguuuccugcccucacugcauucccucaccu

SEQ ID NO: 543368 - RNA, 32 nt, Human
uuguuuccugcucuccucugcccuuucugaaa

SEQ ID NO: 543369 - RNA, 32 nt, Human
uuguuuccugcucugaggcuugugggguggga

SEQ ID NO: 543370 - RNA, 32 nt, Human
uuguuuccuggugagcacagaaucagaacaaa

SEQ ID NO: 543371 - RNA, 22 nt, Human
uuguuucguaaagauaaccagu

SEQ ID NO: 543372 - RNA, 32 nt, Human
uuguuucuacagauggcaacagcuccauaggg

SEQ ID NO: 543373 - RNA, 32 nt, Human
uuguuucuacuacauggaagaccucauuuuga

SEQ ID NO: 543374 - RNA, 32 nt, Human
uuguuucuagaaguccagaauuuuggaccucc

SEQ ID NO: 543375 - RNA, 32 nt, Human
uuguuucucagccaucaaaugauaaugacuaa

SEQ ID NO: 543376 - RNA, 32 nt, Human
uuguuucuccaagccugcuuugugcuucucac

SEQ ID NO: 543377 - RNA, 24 nt, Human
uuguuucuccccaaaucuagaaau

SEQ ID NO: 543378 - RNA, 24 nt, Human
uuguuucuccccacaucuagaaau

SEQ ID NO: 543379 - RNA, 23 nt, Human
uuguuucucccugcucaugaggu

SEQ ID NO: 543380 - RNA, 32 nt, Human
uuguuucuccuggguuaggccccggcuucacu

SEQ ID NO: 543381 - RNA, 32 nt, Human
uuguuucugagacggagucucagucugucacc

SEQ ID NO: 543382 - RNA, 23 nt, Human
uuguuucugagccuaaugaggua

SEQ ID NO: 543383 - RNA, 32 nt, Human
uuguuucugcccugccagcugcagccugguug

SEQ ID NO: 543384 - RNA, 32 nt, Human
uuguuucugccuccugcuauuuuucuuuugac

SEQ ID NO: 543385 - RNA, 32 nt, Human
uuguuucugcugcugugaaaccccaaaguaau

SEQ ID NO: 543386 - RNA, 32 nt, Human
uuguuucuguuucuuuggcuuuucucgcuccg

SEQ ID NO: 543387 - RNA, 32 nt, Human
uuguuucuuacaccuucauucucuccagcauc

SEQ ID NO: 543388 - RNA, 23 nt, Human
uuguuucuucugaguggggaaau

SEQ ID NO: 543389 - RNA, 32 nt, Human
uuguuucuugcugccuaucuguaaguaauuaa

SEQ ID NO: 543390 - RNA, 32 nt, Human
uuguuucuuuguuucguuuccucugcugucuu

SEQ ID NO: 543391 - RNA, 32 nt, Human
uuguuugaaaguaagaaagggaggggaaacuu

SEQ ID NO: 543392 - RNA, 32 nt, Human
uuguuugaacccaggaggcacagguugcagug

SEQ ID NO: 543393 - RNA, 32 nt, Human
uuguuugaacccaggagguggacauuacagug

SEQ ID NO: 543394 - RNA, 32 nt, Human
uuguuugaacccaggagguggaggcugcagug

SEQ ID NO: 543395 - RNA, 32 nt, Human
uuguuugaaccuuagugccuuacccuguccuc

SEQ ID NO: 543396 - RNA, 32 nt, Human
uuguuugaagcacuucgucuuacccauuuaug

SEQ ID NO: 543397 - RNA, 32 nt, Human
uuguuugacauuuugcuuuuugugcacuguga

SEQ ID NO: 543398 - RNA, 32 nt, Human
uuguuugaccucaggacaaguucuaaucucua

SEQ ID NO: 543399 - RNA, 32 nt, Human
uuguuugagacagagucucccucugucaccca

SEQ ID NO: 543400 - RNA, 32 nt, Human
uuguuugagacagggucucacucugucaccca

SEQ ID NO: 543401 - RNA, 32 nt, Human
uuguuugagacagggucucacucugucgcuca

SEQ ID NO: 543402 - RNA, 32 nt, Human
uuguuugagacagggucucccucugucaucca

SEQ ID NO: 543403 - RNA, 32 nt, Human
uuguuugagacagggucuugcucugucaccca

SEQ ID NO: 543404 - RNA, 32 nt, Human
uuguuugagacagggucuuucucugucaccca

SEQ ID NO: 543405 - RNA, 32 nt, Human
uuguuugagauggagucucacucugucaccca

SEQ ID NO: 543406 - RNA, 32 nt, Human
uuguuugagauggagucucacucugucaccua

SEQ ID NO: 543407 - RNA, 32 nt, Human
uuguuugagauggagucuugcucugucaccca

SEQ ID NO: 543408 - RNA, 32 nt, Human
uuguuugagcccaggaauuugagaacaggauu

SEQ ID NO: 543409 - RNA, 32 nt, Human
uuguuugagcccaggagguugaggcugcagug

SEQ ID NO: 543410 - RNA, 32 nt, Human
uuguuugagcccuggagguugaggcugcagug

SEQ ID NO: 543411 - RNA, 32 nt, Human
uuguuugaugauuuuuaaucguuacuauuauu

SEQ ID NO: 543412 - RNA, 32 nt, Human
uuguuugauggauaaauuccaucucugggaau

SEQ ID NO: 543413 - RNA, 31 nt, Human
uuguuugaugugggagaaaaagcgacugggg

SEQ ID NO: 543414 - RNA, 32 nt, Human
uuguuugauuccucccaccuugcugaucauuc

SEQ ID NO: 543415 - RNA, 32 nt, Human
uuguuugauucuguaguuaaauuuccacauuu

SEQ ID NO: 543416 - RNA, 32 nt, Human
uuguuugcaaacauguuuuaaauuaaauucgg

SEQ ID NO: 543417 - RNA, 32 nt, Human
uuguuugcaagacgucugcauguccacaagug

SEQ ID NO: 543418 - RNA, 32 nt, Human
uuguuugcaggauccucagccauguucaagug

SEQ ID NO: 543419 - RNA, 32 nt, Human
uuguuugcagggccugggcaaaaauuuacacu

SEQ ID NO: 543420 - RNA, 32 nt, Human
uuguuugcauuuaugaaucuugcugccuuuua

SEQ ID NO: 543421 - RNA, 32 nt, Human
uuguuugccucuuuggaaacuguuauccuucc

SEQ ID NO: 543422 - RNA, 32 nt, Human
uuguuugccuucccaccugccucugccacacc

SEQ ID NO: 543423 - RNA, 32 nt, Human
uuguuugccuuuugucaacuugcccugcuuug

SEQ ID NO: 543424 - RNA, 32 nt, Human
uuguuugcugggaggcgggagaugcagccagg

SEQ ID NO: 543425 - RNA, 32 nt, Human
uuguuugcugggaggugggagaugcagccagg

SEQ ID NO: 543426 - RNA, 32 nt, Human
uuguuugcuguugucacagucagcugguuucg

SEQ ID NO: 543427 - RNA, 32 nt, Human
uuguuugcuucaugugucccagaagaugacug

SEQ ID NO: 543428 - RNA, 17 nt, Human
uuguuugcuuccuacaa

SEQ ID NO: 543429 - RNA, 32 nt, Human
uuguuugcuugcuuucuuuuguucuguuuuag

SEQ ID NO: 543430 - RNA, 32 nt, Human
uuguuuggaagacuucuaaagaaacugcucca

SEQ ID NO: 543431 - RNA, 32 nt, Human
uuguuuggagaacaacaaggacaacuuuaugu

SEQ ID NO: 543432 - RNA, 32 nt, Human
uuguuuggcagugguugcuguccucuuggcau

SEQ ID NO: 543433 - RNA, 32 nt, Human
uuguuuggccugugauuguaugacuuuugcgg

SEQ ID NO: 543434 - RNA, 32 nt, Human
uuguuugggaggcauagugcugacauauauuc

SEQ ID NO: 543435 - RNA, 32 nt, Human
uuguuuggguacuguauaugagaucaggaaaa

SEQ ID NO: 543436 - RNA, 32 nt, Human
uuguuugguauagaaguguuggaacguacacc

SEQ ID NO: 543437 - RNA, 32 nt, Human
uuguuuguaaaaccaucagauauuucuuaugg

SEQ ID NO: 543438 - RNA, 32 nt, Human
uuguuuguaugaagaugcuguacccacuugaa

SEQ ID NO: 543439 - RNA, 32 nt, Human
uuguuugucauugagucuucucucagaaucag

SEQ ID NO: 543440 - RNA, 32 nt, Human
uuguuugucccuggacuggccaugaagugagg

SEQ ID NO: 543441 - RNA, 29 nt, Human
uuguuuguccugucuuugccuggauccau

SEQ ID NO: 543442 - RNA, 32 nt, Human
uuguuugucuucccaucccccuaaaacauaaa

SEQ ID NO: 543443 - RNA, 32 nt, Human
uuguuugucuuccccacauagaaaguuagcua

SEQ ID NO: 543444 - RNA, 29 nt, Human
uuguuuguguuguguguggaaauggcgaa

SEQ ID NO: 543445 - RNA, 32 nt, Human
uuguuuguuaacguacugugacuuuaacuuua

SEQ ID NO: 543446 - RNA, 32 nt, Human
uuguuuguugagauaaggucuugcuguguggc

SEQ ID NO: 543447 - RNA, 32 nt, Human
uuguuuguugcucuuuccuucucuccaucaua

SEQ ID NO: 543448 - RNA, 32 nt, Human
uuguuuguuucuucaugccuuuacuuacuuug

SEQ ID NO: 543449 - RNA, 32 nt, Human
uuguuuguuucuugaaaaugagagaagagccg

SEQ ID NO: 543450 - RNA, 32 nt, Human
uuguuuguuugcagucucucucugccauggcc

SEQ ID NO: 543451 - RNA, 32 nt, Human
uuguuuguuuucuuugagauggagucucgcuc

SEQ ID NO: 543452 - RNA, 32 nt, Human
uuguuuguuuuuaagaaaagcucaguucuaga

SEQ ID NO: 543453 - RNA, 20 nt, Human
uuguuuuaaaaacuggcccu

SEQ ID NO: 543454 - RNA, 32 nt, Human
uuguuuuaaaacugaucaguuuugccaagggg

SEQ ID NO: 543455 - RNA, 32 nt, Human
uuguuuuaaagucaucuuuacuuucccaaaug

SEQ ID NO: 543456 - RNA, 32 nt, Human
uuguuuuaaauacuugagccuuuuucucggug

SEQ ID NO: 543457 - RNA, 23 nt, Human
uuguuuuaaccuccccucucccc

SEQ ID NO: 543458 - RNA, 32 nt, Human
uuguuuuacacguagcccacugccucauuaua

SEQ ID NO: 543459 - RNA, 23 nt, Human
uuguuuuagucauuuucuuugca

SEQ ID NO: 543460 - RNA, 23 nt, Human
uuguuuuauaaccaauucauuaa

SEQ ID NO: 543461 - RNA, 22 nt, Human
uuguuuuaugaaucauacacua

SEQ ID NO: 543462 - RNA, 32 nt, Human
uuguuuuaugauaaaggaagugugugauuucc

SEQ ID NO: 543463 - RNA, 28 nt, Human
uuguuuuauuaaaaauaauuagugaaag

SEQ ID NO: 543464 - RNA, 23 nt, Human
uuguuuuauuugucccucucccc

SEQ ID NO: 543465 - RNA, 32 nt, Human
uuguuuucaacuuuucauuuggauguuuggcg

SEQ ID NO: 543466 - RNA, 32 nt, Human
uuguuuucaaugccagugggccaaauauaugg

SEQ ID NO: 543467 - RNA, 32 nt, Human
uuguuuucacucgucuaucauaggcaccuucu

SEQ ID NO: 543468 - RNA, 32 nt, Human
uuguuuuccccucaccucacagugccuaugug

SEQ ID NO: 543469 - RNA, 32 nt, Human
uuguuuucccuuccccauuuccuuccuucccu

SEQ ID NO: 543470 - RNA, 32 nt, Human
uuguuuuccucccucuccucuggcugcuacaa

SEQ ID NO: 543471 - RNA, 32 nt, Human
uuguuuuccugccgcaggaacgcuaggcaguc

SEQ ID NO: 543472 - RNA, 32 nt, Human
uuguuuucuaagcauuguggcuucucaguggc

SEQ ID NO: 543473 - RNA, 32 nt, Human
uuguuuucuaagcuuacuaucuuguguuuguu

SEQ ID NO: 543474 - RNA, 32 nt, Human
uuguuuucuauauucacaauaucuuaaaaggc

SEQ ID NO: 543475 - RNA, 32 nt, Human
uuguuuucuccucugcuuggagaguuugcccu

SEQ ID NO: 543476 - RNA, 32 nt, Human
uuguuuucucugauggacaaaggcaggggacc

SEQ ID NO: 543477 - RNA, 32 nt, Human
uuguuuucugagauggagucuugcugugucac

SEQ ID NO: 543478 - RNA, 32 nt, Human
uuguuuucuuaaaaucagcagcuauuuagcgu

SEQ ID NO: 543479 - RNA, 32 nt, Human
uuguuuucuuucagaguuuccuccuucaaaaa

SEQ ID NO: 543480 - RNA, 32 nt, Human
uuguuuucuuucuccuccaugugucuuggcag

SEQ ID NO: 543481 - RNA, 23 nt, Human
uuguuuucuuuuucugucuugua

SEQ ID NO: 543482 - RNA, 23 nt, Human
uuguuuugaaaaacaguggggug

SEQ ID NO: 543483 - RNA, 32 nt, Human
uuguuuugccuuuuuaaauuacaucuccaagu

SEQ ID NO: 543484 - RNA, 32 nt, Human
uuguuuugcuucuguaaguuugccuauaaaaa

SEQ ID NO: 543485 - RNA, 32 nt, Human
uuguuuuggcaucauccucaucauguuguauu

SEQ ID NO: 543486 - RNA, 29 nt, Human
uuguuuuggcugcucuccaucucuuguac

SEQ ID NO: 543487 - RNA, 32 nt, Human
uuguuuugucauugcuugcucuggcugugucu

SEQ ID NO: 543488 - RNA, 32 nt, Human
uuguuuuguccaugccuuccucccugcacgca

SEQ ID NO: 543489 - RNA, 32 nt, Human
uuguuuugucuuagccacaagaauuccgaggu

SEQ ID NO: 543490 - RNA, 23 nt, Human
uuguuuuguuucguucuggguca

SEQ ID NO: 543491 - RNA, 25 nt, Human
uuguuuuguuuuguuuuguuuugca

SEQ ID NO: 543492 - RNA, 32 nt, Human
uuguuuuguuuuucugagacaaggucuuacuc

SEQ ID NO: 543493 - RNA, 22 nt, Human
uuguuuuguuuuucuguuuugu

SEQ ID NO: 543494 - RNA, 32 nt, Human
uuguuuuuagagucagucauuggcuuugucau

SEQ ID NO: 543495 - RNA, 32 nt, Human
uuguuuuuaggcaauucuggcuggccugagaa

SEQ ID NO: 543496 - RNA, 32 nt, Human
uuguuuuuagucucuugugcugugccuagugg

SEQ ID NO: 543497 - RNA, 32 nt, Human
uuguuuuuaucaauaaauacuuguugauugug

SEQ ID NO: 543498 - RNA, 32 nt, Human
uuguuuuuauugcagccauauccacuuaucca

SEQ ID NO: 543499 - RNA, 32 nt, Human
uuguuuuucaaaugucaccaauaaaaguuuug

SEQ ID NO: 543500 - RNA, 31 nt, Human
uuguuuuucaauaaauauuuugaaacauguu

SEQ ID NO: 543501 - RNA, 32 nt, Human
uuguuuuucccaaguucucuguucuggauuuu

SEQ ID NO: 543502 - RNA, 23 nt, Human
uuguuuuuccccaguuggcugaa

SEQ ID NO: 543503 - RNA, 32 nt, Human
uuguuuuuccccucucccuccugcuuucuuuu

SEQ ID NO: 543504 - RNA, 32 nt, Human
uuguuuuuccuccucuccuuuuccugccgccu

SEQ ID NO: 543505 - RNA, 32 nt, Human
uuguuuuuccugcuguugauuguuacuagugg

SEQ ID NO: 543506 - RNA, 32 nt, Human
uuguuuuucucuucgcuucaggcccuuacaca

SEQ ID NO: 543507 - RNA, 32 nt, Human
uuguuuuugagacaagagucucgcucugucac

SEQ ID NO: 543508 - RNA, 32 nt, Human
uuguuuuugagaccauugcauucuggcugguu

SEQ ID NO: 543509 - RNA, 32 nt, Human
uuguuuuugccuggcucucagguugcuucuga

SEQ ID NO: 543510 - RNA, 32 nt, Human
uuguuuuugcuuguaaucucacugagccaaau

SEQ ID NO: 543511 - RNA, 23 nt, Human
uuguuuuugggggcuaauuggug

SEQ ID NO: 543512 - RNA, 32 nt, Human
uuguuuuugucacuugccccagcagagcaggg

SEQ ID NO: 543513 - RNA, 32 nt, Human
uuguuuuugucccuuucuuggaaauguuaaug

SEQ ID NO: 543514 - RNA, 20 nt, Human
uuguuuuuguugcugagcca

SEQ ID NO: 543515 - RNA, 21 nt, Human
uuguuuuuuaauaauguggua

SEQ ID NO: 543516 - RNA, 23 nt, Human
uuguuuuuugcuaccucuuccuc

SEQ ID NO: 543517 - RNA, 32 nt, Human
uuuaaaaacacaaaucuaagccuugacgguuu

SEQ ID NO: 543518 - RNA, 32 nt, Human
uuuaaaaacagcacuggcuggggcauucucau

SEQ ID NO: 543519 - RNA, 32 nt, Human
uuuaaaaacauguacugagaugaaucuaauuu

SEQ ID NO: 543520 - RNA, 32 nt, Human
uuuaaaaagaacaugccacgauuuugucuuuc

SEQ ID NO: 543521 - RNA, 32 nt, Human
uuuaaaaagaacgaagcuggaggacucacacu

SEQ ID NO: 543522 - RNA, 32 nt, Human
uuuaaaaagaugauugcuggucuuaacuuuag

SEQ ID NO: 543523 - RNA, 30 nt, Human
uuuaaaaagcccuccaugcuauuuugauga

SEQ ID NO: 543524 - RNA, 32 nt, Human
uuuaaaaaggaaggaaggagcaagugaaguuu

SEQ ID NO: 543525 - RNA, 32 nt, Human
uuuaaaaaggggagaugagaaagggaauacua

SEQ ID NO: 543526 - RNA, 32 nt, Human
uuuaaaaaguacucaaugaaguugcccucagg

SEQ ID NO: 543527 - RNA, 32 nt, Human
uuuaaaaagugagaaauggggaaaagaagagg

SEQ ID NO: 543528 - RNA, 32 nt, Human
uuuaaaaaguuagccagguaugguggcauaua

SEQ ID NO: 543529 - RNA, 31 nt, Human
uuuaaaaauaaagggcuuucacugggcauga

SEQ ID NO: 543530 - RNA, 32 nt, Human
uuuaaaaauagguuuuuaaagcuuucauuuuu

SEQ ID NO: 543531 - RNA, 32 nt, Human
uuuaaaaaucacccucuacuuguucuccugug

SEQ ID NO: 543532 - RNA, 32 nt, Human
uuuaaaaauccgccacaccauccaucagaauc

SEQ ID NO: 543533 - RNA, 32 nt, Human
uuuaaaaaucuuguaccuagcacaguauuguu

SEQ ID NO: 543534 - RNA, 32 nt, Human
uuuaaaaauuagccgggcaaugguggcgccug

SEQ ID NO: 543535 - RNA, 32 nt, Human
uuuaaaaauuagccuugauauucuccagacca

SEQ ID NO: 543536 - RNA, 32 nt, Human
uuuaaaaauuguacuucagaacaucagauuuu

SEQ ID NO: 543537 - RNA, 32 nt, Human
uuuaaaaauuguuguuuauuugccaaagucaa

SEQ ID NO: 543538 - RNA, 32 nt, Human
uuuaaaaauuuagcuggguguggugguacgug

SEQ ID NO: 543539 - RNA, 32 nt, Human
uuuaaaacaaaggccugugcuccacccaggag

SEQ ID NO: 543540 - RNA, 32 nt, Human
uuuaaaacaaccauugcauguuugcuuuugau

SEQ ID NO: 543541 - RNA, 32 nt, Human
uuuaaaacaagaaaguuuccccaccagugaau

SEQ ID NO: 543542 - RNA, 32 nt, Human
uuuaaaacacacacauacacacacaaaacaau

SEQ ID NO: 543543 - RNA, 32 nt, Human
uuuaaaacacagauaugaugguccuugcugca

SEQ ID NO: 543544 - RNA, 32 nt, Human
uuuaaaacagaagugaaaccacgggugcuuug

SEQ ID NO: 543545 - RNA, 32 nt, Human
uuuaaaacagagggaagaauauacagauugaa

SEQ ID NO: 543546 - RNA, 32 nt, Human
uuuaaaacagcccaguauuccuuuguauccuc

SEQ ID NO: 543547 - RNA, 32 nt, Human
uuuaaaacauaaauagcuuggaacacccugaa

SEQ ID NO: 543548 - RNA, 31 nt, Human
uuuaaaacauaaugccuacuugauuuauauc

SEQ ID NO: 543549 - RNA, 32 nt, Human
uuuaaaacaucauaggccagggccccucaccc

SEQ ID NO: 543550 - RNA, 23 nt, Human
uuuaaaacaugaauugcucgaca

SEQ ID NO: 543551 - RNA, 32 nt, Human
uuuaaaaccacagccaugaacagacguugggg

SEQ ID NO: 543552 - RNA, 32 nt, Human
uuuaaaaccagcacaagcaaaugaguaucaca

SEQ ID NO: 543553 - RNA, 32 nt, Human
uuuaaaacucccagacacgcacugccugugca

SEQ ID NO: 543554 - RNA, 32 nt, Human
uuuaaaacuugcuuuguuuagaauucccaccu

SEQ ID NO: 543555 - RNA, 32 nt, Human
uuuaaaacuuucuaacaauauagucuuuggau

SEQ ID NO: 543556 - RNA, 32 nt, Human
uuuaaaagaaaauaggggcacaggcuguugag

SEQ ID NO: 543557 - RNA, 32 nt, Human
uuuaaaagacagggucccuauucuuuaguuau

SEQ ID NO: 543558 - RNA, 32 nt, Human
uuuaaaagaccaugacgaauguguacacagaa

SEQ ID NO: 543559 - RNA, 32 nt, Human
uuuaaaagacucagucuaggcuugccuuugca

SEQ ID NO: 543560 - RNA, 32 nt, Human
uuuaaaagacuuuuaaaauauguguuuucauu

SEQ ID NO: 543561 - RNA, 32 nt, Human
uuuaaaagagcaggccaggcgcgguggcucac

SEQ ID NO: 543562 - RNA, 32 nt, Human
uuuaaaagaggucucuaacugaagagagaugg

SEQ ID NO: 543563 - RNA, 32 nt, Human
uuuaaaagcaccugacuagcauguguucuuga

SEQ ID NO: 543564 - RNA, 32 nt, Human
uuuaaaagcccagauuuccggccagguguggu

SEQ ID NO: 543565 - RNA, 32 nt, Human
uuuaaaagcccccaaagaagcuucuguuuugg

SEQ ID NO: 543566 - RNA, 32 nt, Human
uuuaaaagcccccaaggaaggaggcugggacu

SEQ ID NO: 543567 - RNA, 30 nt, Human
uuuaaaagccucucaaugcguccucgaccu

SEQ ID NO: 543568 - RNA, 32 nt, Human
uuuaaaagcuucaaaaugaugggauaugauca

SEQ ID NO: 543569 - RNA, 32 nt, Human
uuuaaaaggaaaagaauaaguauucuugcauc

SEQ ID NO: 543570 - RNA, 32 nt, Human
uuuaaaaggagagaggaggggugauggcaggg

SEQ ID NO: 543571 - RNA, 32 nt, Human
uuuaaaaggccuccaauacucuuauggagccu

SEQ ID NO: 543572 - RNA, 32 nt, Human
uuuaaaaggccugaacuauacuuugaagaaac

SEQ ID NO: 543573 - RNA, 32 nt, Human
uuuaaaaggcuggaggcaagguggugacaggc

SEQ ID NO: 543574 - RNA, 32 nt, Human
uuuaaaagguacuguacaaccauuauaucugu

SEQ ID NO: 543575 - RNA, 32 nt, Human
uuuaaaagguauaaaucaaaauaacaaauuau

SEQ ID NO: 543576 - RNA, 32 nt, Human
uuuaaaagguuuucccuuuucugaucugcauu

SEQ ID NO: 543577 - RNA, 32 nt, Human
uuuaaaagugucacucuuccuccuuuucuacu

SEQ ID NO: 543578 - RNA, 32 nt, Human
uuuaaaaguucuguugcuuguauuaacacgaa

SEQ ID NO: 543579 - RNA, 32 nt, Human
uuuaaaauaucuugagguauuuugccacuggc

SEQ ID NO: 543580 - RNA, 32 nt, Human
uuuaaaauauguuccugauuguacauauugua

SEQ ID NO: 543581 - RNA, 32 nt, Human
uuuaaaaucacuucucuggccucugguuucuc

SEQ ID NO: 543582 - RNA, 32 nt, Human
uuuaaaauccuucguagggaaggacagcuguc

SEQ ID NO: 543583 - RNA, 32 nt, Human
uuuaaaaucuuaaaauguuucuuauuuucagc

SEQ ID NO: 543584 - RNA, 32 nt, Human
uuuaaaaucuuccuacacacaucuagacguuc

SEQ ID NO: 543585 - RNA, 32 nt, Human
uuuaaaaugagacaggcuacccuucgggaguc

SEQ ID NO: 543586 - RNA, 32 nt, Human
uuuaaaaugcagcaggaggagaggugaagaca

SEQ ID NO: 543587 - RNA, 32 nt, Human
uuuaaaaugggaaauacuuuuuaaguuauuca

SEQ ID NO: 543588 - RNA, 32 nt, Human
uuuaaaaugguaauaacaguaccaccuaauag

SEQ ID NO: 543589 - RNA, 32 nt, Human
uuuaaaauguacauuauaaccuguaugguauu

SEQ ID NO: 543590 - RNA, 32 nt, Human
uuuaaaauguguuuguuggaggucauuaacgu

SEQ ID NO: 543591 - RNA, 32 nt, Human
uuuaaaauguucagguagcagugagcauuguu

SEQ ID NO: 543592 - RNA, 32 nt, Human
uuuaaaauuuucaauucuuugaucucaugcaa

SEQ ID NO: 543593 - RNA, 32 nt, Human
uuuaaacaaaaauaggaaacuuagauguaacu

SEQ ID NO: 543594 - RNA, 32 nt, Human
uuuaaacaaccagggacccucugccccuagaa

SEQ ID NO: 543595 - RNA, 32 nt, Human
uuuaaacacaaaccaaauacuccaggguuuug

SEQ ID NO: 543596 - RNA, 32 nt, Human
uuuaaacacaucagugcuuccacauucaccua

SEQ ID NO: 543597 - RNA, 32 nt, Human
uuuaaacacgucaucaauucauugccugcagc

SEQ ID NO: 543598 - RNA, 32 nt, Human
uuuaaacacugaagugccgaaguggcccgugc

SEQ ID NO: 543599 - RNA, 32 nt, Human
uuuaaacacuguugcauguuguaauaucaggu

SEQ ID NO: 543600 - RNA, 32 nt, Human
uuuaaacagaacuucauuccccguugaacuuu

SEQ ID NO: 543601 - RNA, 32 nt, Human
uuuaaacagcugacauuugggcaauuugagua

SEQ ID NO: 543602 - RNA, 22 nt, Human
uuuaaacauauggcaucucuca

SEQ ID NO: 543603 - RNA, 32 nt, Human
uuuaaacauguaaaaguauggaaguacaucca

SEQ ID NO: 543604 - RNA, 24 nt, Human
uuuaaacauuuauguuuaaaagua

SEQ ID NO: 543605 - RNA, 32 nt, Human
uuuaaaccagagaagauggaguucuaaaagua

SEQ ID NO: 543606 - RNA, 32 nt, Human
uuuaaaccagccugggcaccauggugagaccc

SEQ ID NO: 543607 - RNA, 32 nt, Human
uuuaaaccaguaguucuuuaauuuacgggucu

SEQ ID NO: 543608 - RNA, 32 nt, Human
uuuaaaccauuccacccggcaguauucagcuu

SEQ ID NO: 543609 - RNA, 32 nt, Human
uuuaaacccaggaggcagagguugcagugagu

SEQ ID NO: 543610 - RNA, 32 nt, Human
uuuaaacccuaccugugugauucaguaggguu

SEQ ID NO: 543611 - RNA, 32 nt, Human
uuuaaaccggucuuuuggggcugcaguaaaaa

SEQ ID NO: 543612 - RNA, 32 nt, Human
uuuaaaccuccccuccucuccuccuuucaccu

SEQ ID NO: 543613 - RNA, 32 nt, Human
uuuaaaccucucuauucccugccauaacaucu

SEQ ID NO: 543614 - RNA, 32 nt, Human
uuuaaaccugaacauugaaacaguuuuccucc

SEQ ID NO: 543615 - RNA, 32 nt, Human
uuuaaaccuuggaaggugaaaauguacaaacu

SEQ ID NO: 543616 - RNA, 32 nt, Human
uuuaaacgcagauagagaguucagaguugaug

SEQ ID NO: 543617 - RNA, 32 nt, Human
uuuaaacgcuguugcauguuguaauaccaggu

SEQ ID NO: 543618 - RNA, 32 nt, Human
uuuaaacuaggagaaccaaaucuggaagccaa

SEQ ID NO: 543619 - RNA, 32 nt, Human
uuuaaacuauguuuuucagcccuucagaaggg

SEQ ID NO: 543620 - RNA, 32 nt, Human
uuuaaacucaaagggaagccuuaucuguggcu

SEQ ID NO: 543621 - RNA, 32 nt, Human
uuuaaacucauuuucucugcuugaauacacaa

SEQ ID NO: 543622 - RNA, 32 nt, Human
uuuaaacucauuuuugccauacaucaguuauu

SEQ ID NO: 543623 - RNA, 32 nt, Human
uuuaaacucuccccgucauuuccaaauauuuc

SEQ ID NO: 543624 - RNA, 32 nt, Human
uuuaaacugcaaugccaguccugcaggagugc

SEQ ID NO: 543625 - RNA, 32 nt, Human
uuuaaacuggcggugccaguugcagugaaggu

SEQ ID NO: 543626 - RNA, 32 nt, Human
uuuaaacuguauaauggagcuagauacaagca

SEQ ID NO: 543627 - RNA, 20 nt, Human
uuuaaacuguauuuaccagu

SEQ ID NO: 543628 - RNA, 32 nt, Human
uuuaaacuucucuauucccugccauaacaucu

SEQ ID NO: 543629 - RNA, 32 nt, Human
uuuaaacuuggggaagauuaagaaaagaacca

SEQ ID NO: 543630 - RNA, 32 nt, Human
uuuaaacuuugccaugaacuccugggcuuugg

SEQ ID NO: 543631 - RNA, 32 nt, Human
uuuaaagaaaaaugaaaaagguuaguguuugg

SEQ ID NO: 543632 - RNA, 32 nt, Human
uuuaaagaaagccacacagagcugaaucgggc

SEQ ID NO: 543633 - RNA, 32 nt, Human
uuuaaagaaagccucagacaguaagggcuuuu

SEQ ID NO: 543634 - RNA, 32 nt, Human
uuuaaagaauccagauauuuuacugcaaaagu

SEQ ID NO: 543635 - RNA, 32 nt, Human
uuuaaagacacgauuccucagaccagugagca

SEQ ID NO: 543636 - RNA, 32 nt, Human
uuuaaagacugagccaagucaccuccagggca

SEQ ID NO: 543637 - RNA, 32 nt, Human
uuuaaagagaaaaguacaagacagaaaucuuc

SEQ ID NO: 543638 - RNA, 32 nt, Human
uuuaaagagaagcagacugacuuuggaaaggg

SEQ ID NO: 543639 - RNA, 32 nt, Human
uuuaaagagacaccucuggaccugcagcaccg

SEQ ID NO: 543640 - RNA, 32 nt, Human
uuuaaagagacaccucuggaccugcugcaccg

SEQ ID NO: 543641 - RNA, 32 nt, Human
uuuaaagagacacugucccacuccaucaccca

SEQ ID NO: 543642 - RNA, 32 nt, Human
uuuaaagauagaauuuguuuacauucucugga

SEQ ID NO: 543643 - RNA, 32 nt, Human
uuuaaagaucucggugcugaacgacaguccca

SEQ ID NO: 543644 - RNA, 32 nt, Human
uuuaaagauggaacucacccuuugcuugguuu

SEQ ID NO: 543645 - RNA, 32 nt, Human
uuuaaagauggaacuccacccuuugcuugguu

SEQ ID NO: 543646 - RNA, 32 nt, Human
uuuaaagauuuacacagauuugaauagcagug

SEQ ID NO: 543647 - RNA, 32 nt, Human
uuuaaagauuuuuagugcaauggcacgguaac

SEQ ID NO: 543648 - RNA, 32 nt, Human
uuuaaagcaaaauggggauugaagggacuuau

SEQ ID NO: 543649 - RNA, 32 nt, Human
uuuaaagcacacuguaauaauaaaugcaauua

SEQ ID NO: 543650 - RNA, 32 nt, Human
uuuaaagcauuguaugauuccacccauggcaa

SEQ ID NO: 543651 - RNA, 32 nt, Human
uuuaaagccaaugagcccccaacagagcucuu

SEQ ID NO: 543652 - RNA, 32 nt, Human
uuuaaagccaucaucuuaucuucuagcuguac

SEQ ID NO: 543653 - RNA, 32 nt, Human
uuuaaagccauggaacaaaaccugauacauca

SEQ ID NO: 543654 - RNA, 32 nt, Human
uuuaaagcccuucugaugauuccaauguguug

SEQ ID NO: 543655 - RNA, 32 nt, Human
uuuaaagcuagcaauaaaugcuaugcagaaaa

SEQ ID NO: 543656 - RNA, 32 nt, Human
uuuaaagcugggugucugggggagacaucaca

SEQ ID NO: 543657 - RNA, 32 nt, Human
uuuaaagcuguggaaaagcagagcccuagaag

SEQ ID NO: 543658 - RNA, 32 nt, Human
uuuaaagcuuaaguuuuaucguguaaauacau

SEQ ID NO: 543659 - RNA, 32 nt, Human
uuuaaagcuuacccuugguuugcacauaaaac

SEQ ID NO: 543660 - RNA, 32 nt, Human
uuuaaagcuuuuccuuuuuagguuggagaagg

SEQ ID NO: 543661 - RNA, 32 nt, Human
uuuaaagcuuuugcacccaugccuucacuuca

SEQ ID NO: 543662 - RNA, 32 nt, Human
uuuaaaggaaaaucacaucuccaggcuuucaa

SEQ ID NO: 543663 - RNA, 32 nt, Human
uuuaaaggaaaggaaagagggagccaaaguag

SEQ ID NO: 543664 - RNA, 32 nt, Human
uuuaaaggaacagcacuucuuagcuguucaca

SEQ ID NO: 543665 - RNA, 32 nt, Human
uuuaaaggaagccacaugaaaauugaguuugg

SEQ ID NO: 543666 - RNA, 32 nt, Human
uuuaaaggagaaagcuuauuauggaaagucac

SEQ ID NO: 543667 - RNA, 32 nt, Human
uuuaaaggaguaaugggaauccuucaacuaca

SEQ ID NO: 543668 - RNA, 32 nt, Human
uuuaaaggagugagccagucacccaggagaau

SEQ ID NO: 543669 - RNA, 31 nt, Human
uuuaaaggcaugucuccagugcugagcauga

SEQ ID NO: 543670 - RNA, 32 nt, Human
uuuaaaggccacccucuccagccccuuguccc

SEQ ID NO: 543671 - RNA, 32 nt, Human
uuuaaaggcccagccccuagaaacccaagcuc

SEQ ID NO: 543672 - RNA, 32 nt, Human
uuuaaagggaacaugugaaugaauacacagga

SEQ ID NO: 543673 - RNA, 32 nt, Human
uuuaaagggcccucugcuggcugaguggcaau

SEQ ID NO: 543674 - RNA, 32 nt, Human
uuuaaagggcuccaaucagggauuugcaggag

SEQ ID NO: 543675 - RNA, 32 nt, Human
uuuaaaggggugagccaccgcacccaguccug

SEQ ID NO: 543676 - RNA, 32 nt, Human
uuuaaagguaggguccagaagagucauauaua

SEQ ID NO: 543677 - RNA, 32 nt, Human
uuuaaaguaagcaugucuuaccuucacuuagc

SEQ ID NO: 543678 - RNA, 32 nt, Human
uuuaaaguaaguauggauuauggaagucuagu

SEQ ID NO: 543679 - RNA, 32 nt, Human
uuuaaaguaauauuucuuucuaauauaauauu

SEQ ID NO: 543680 - RNA, 32 nt, Human
uuuaaaguagcuugacuuuuucugcuaguguu

SEQ ID NO: 543681 - RNA, 32 nt, Human
uuuaaagucaucucuucagcaauccagagguu

SEQ ID NO: 543682 - RNA, 32 nt, Human
uuuaaagucgcugaucauccucuuccucaucu

SEQ ID NO: 543683 - RNA, 32 nt, Human
uuuaaaguuaacuaacagcuguaguuugcuuu

SEQ ID NO: 543684 - RNA, 32 nt, Human
uuuaaaguuaguaucuacagauggaauuguau

SEQ ID NO: 543685 - RNA, 32 nt, Human
uuuaaauaaagcaguuuuuaaaacuacuguug

SEQ ID NO: 543686 - RNA, 32 nt, Human
uuuaaauaagagggugaaggggaaccagagcg

SEQ ID NO: 543687 - RNA, 32 nt, Human
uuuaaauaagcauuaacuaacaaccuuucuau

SEQ ID NO: 543688 - RNA, 32 nt, Human
uuuaaauacauacuuauguuuguauuaaucua

SEQ ID NO: 543689 - RNA, 32 nt, Human
uuuaaauacauuuaauaugucauuuuaaaaau

SEQ ID NO: 543690 - RNA, 32 nt, Human
uuuaaauaccccuuucuaguaaugccaaagac

SEQ ID NO: 543691 - RNA, 32 nt, Human
uuuaaauacuauauguaucucauguacaaagu

SEQ ID NO: 543692 - RNA, 32 nt, Human
uuuaaauacuuuccuggcugggcgugguggcu

SEQ ID NO: 543693 - RNA, 32 nt, Human
uuuaaauagcuuuuugcuauaugauaauauag

SEQ ID NO: 543694 - RNA, 32 nt, Human
uuuaaauaggacacaucucccuauguuuaacu

SEQ ID NO: 543695 - RNA, 32 nt, Human
uuuaaauaguugguugaagaagaugaggcacu

SEQ ID NO: 543696 - RNA, 32 nt, Human
uuuaaauauauguacacacgcauguacacaca

SEQ ID NO: 543697 - RNA, 32 nt, Human
uuuaaauauccaggugugccccuccaagucac

SEQ ID NO: 543698 - RNA, 32 nt, Human
uuuaaauauuuuuaagauaauguauauugauu

SEQ ID NO: 543699 - RNA, 32 nt, Human
uuuaaaucaaauacaguuauuuuaguuacagg

SEQ ID NO: 543700 - RNA, 32 nt, Human
uuuaaaucacauaaaaagccaaucuacucuuc

SEQ ID NO: 543701 - RNA, 32 nt, Human
uuuaaaucagauuggaagacauggacaaauca

SEQ ID NO: 543702 - RNA, 32 nt, Human
uuuaaaucagcccuguuaguaggaauguggcu

SEQ ID NO: 543703 - RNA, 32 nt, Human
uuuaaaucagcuguuucauguauuagccuugc

SEQ ID NO: 543704 - RNA, 32 nt, Human
uuuaaauccacucuaaaccuucccucuaagug

SEQ ID NO: 543705 - RNA, 32 nt, Human
uuuaaaucuccuccucuucuuccuguccaugc

SEQ ID NO: 543706 - RNA, 32 nt, Human
uuuaaaucugaacaaucccacagggaaaucag

SEQ ID NO: 543707 - RNA, 32 nt, Human
uuuaaaucugaacaauccuacagggaaaucag

SEQ ID NO: 543708 - RNA, 32 nt, Human
uuuaaaucuuccugggucccaaggaauuagaa

SEQ ID NO: 543709 - RNA, 32 nt, Human
uuuaaaugaaaaauuccuauguucaguagcgu

SEQ ID NO: 543710 - RNA, 32 nt, Human
uuuaaaugaacaaguaaccacaucucaggcgg

SEQ ID NO: 543711 - RNA, 32 nt, Human
uuuaaaugcauucaucauuugacaguguucuc

SEQ ID NO: 543712 - RNA, 32 nt, Human
uuuaaaugcugaacuguuacacaugcuugauu

SEQ ID NO: 543713 - RNA, 32 nt, Human
uuuaaaugcugaacuguuacacaugcuuguuu

SEQ ID NO: 543714 - RNA, 32 nt, Human
uuuaaauggaaaggagaaugacagcaaagccu

SEQ ID NO: 543715 - RNA, 32 nt, Human
uuuaaauggaguuauuuguagguccuuucuua

SEQ ID NO: 543716 - RNA, 32 nt, Human
uuuaaaugggagaaagaaagagauugacauuu

SEQ ID NO: 543717 - RNA, 32 nt, Human
uuuaaaugguugaaaaaggaaaaagaauguuu

SEQ ID NO: 543718 - RNA, 32 nt, Human
uuuaaauguacaccugauuugagaagcugaag

SEQ ID NO: 543719 - RNA, 32 nt, Human
uuuaaauguguucauguacaguccccaucagu

SEQ ID NO: 543720 - RNA, 32 nt, Human
uuuaaauuaaagaaauaucauuauggaacacu

SEQ ID NO: 543721 - RNA, 32 nt, Human
uuuaaauuaaagcaaaguaaauaaaaguacaa

SEQ ID NO: 543722 - RNA, 32 nt, Human
uuuaaauuaacuuauuuuguagaagacaaaau

SEQ ID NO: 543723 - RNA, 32 nt, Human
uuuaaauuaaggcuuuuaaaauagaaagcuga

SEQ ID NO: 543724 - RNA, 32 nt, Human
uuuaaauuaauuuuuaauucuuuuggcaaguu

SEQ ID NO: 543725 - RNA, 32 nt, Human
uuuaaauuaggaaaaagcugaagguucaaaca

SEQ ID NO: 543726 - RNA, 32 nt, Human
uuuaaauuaguaucccugccuaggugaaaagu

SEQ ID NO: 543727 - RNA, 32 nt, Human
uuuaaauuaguggaaaaguauguguggagaug

SEQ ID NO: 543728 - RNA, 23 nt, Human
uuuaaauucacuuguagccugga

SEQ ID NO: 543729 - RNA, 32 nt, Human
uuuaaauucccauuccaccacagugccccuca

SEQ ID NO: 543730 - RNA, 32 nt, Human
uuuaaauucuggagaaauaagauagaaagaaa

SEQ ID NO: 543731 - RNA, 32 nt, Human
uuuaaauucuuacacugacucuuccaaagucu

SEQ ID NO: 543732 - RNA, 32 nt, Human
uuuaaauucuuuuugugaccucagaaugucuc

SEQ ID NO: 543733 - RNA, 32 nt, Human
uuuaaauugcagccauuuccuaggcaacuucu

SEQ ID NO: 543734 - RNA, 32 nt, Human
uuuaaauugccugccaugccucuuuuccucca

SEQ ID NO: 543735 - RNA, 32 nt, Human
uuuaaauuggggacugugugugcuggugugug

SEQ ID NO: 543736 - RNA, 23 nt, Human
uuuaaauuuaccuauagccugga

SEQ ID NO: 543737 - RNA, 24 nt, Human
uuuaaauuuagauguucaaaagua

SEQ ID NO: 543738 - RNA, 23 nt, Human
uuuaaauuuaguguacaaaugua

SEQ ID NO: 543739 - RNA, 32 nt, Human
uuuaaauuucagacugauauauucccaguauu

SEQ ID NO: 543740 - RNA, 23 nt, Human
uuuaaauuugcuauuucaaaagu

SEQ ID NO: 543741 - RNA, 32 nt, Human
uuuaaauuuucccuaaacaauggaaguacaug

SEQ ID NO: 543742 - RNA, 32 nt, Human
uuuaaauuuugaaaucuaaacauucuuuccca

SEQ ID NO: 543743 - RNA, 23 nt, Human
uuuaacaaaacuaaucuaaaaaa

SEQ ID NO: 543744 - RNA, 32 nt, Human
uuuaacaaaaggccaccuuuaaccuuuaacaa

SEQ ID NO: 543745 - RNA, 32 nt, Human
uuuaacaaacuaaggcagaaauacuaaaaaua

SEQ ID NO: 543746 - RNA, 32 nt, Human
uuuaacaaagagaggaaggagaagugaggaag

SEQ ID NO: 543747 - RNA, 32 nt, Human
uuuaacaagacuuggaacaugugcaaauggaa

SEQ ID NO: 543748 - RNA, 32 nt, Human
uuuaacaaucaccucagaugacuuugauguua

SEQ ID NO: 543749 - RNA, 32 nt, Human
uuuaacacacagacccaagauucauacuauua

SEQ ID NO: 543750 - RNA, 32 nt, Human
uuuaacacaccuagaggcugggcauaguagcu

SEQ ID NO: 543751 - RNA, 32 nt, Human
uuuaacacagccguguguucaaauguacagug

SEQ ID NO: 543752 - RNA, 32 nt, Human
uuuaacacccagcccagugguucuuucauaga

SEQ ID NO: 543753 - RNA, 32 nt, Human
uuuaacaccgcagaacccccucccagaagaag

SEQ ID NO: 543754 - RNA, 32 nt, Human
uuuaacacuaguauuuguuaaaugggguauuu

SEQ ID NO: 543755 - RNA, 32 nt, Human
uuuaacacugcauuuccccaaggaggcgggug

SEQ ID NO: 543756 - RNA, 32 nt, Human
uuuaacacuuggcucaaaccucuaggucauac

SEQ ID NO: 543757 - RNA, 32 nt, Human
uuuaacagaaacaaacagcccaaauuacuuua

SEQ ID NO: 543758 - RNA, 32 nt, Human
uuuaacagaaaugcuaauaaccuacugggaaa

SEQ ID NO: 543759 - RNA, 32 nt, Human
uuuaacagauagaguguggcuucauuugucca

SEQ ID NO: 543760 - RNA, 32 nt, Human
uuuaacagauuuuguauauacacacacaaguu

SEQ ID NO: 543761 - RNA, 32 nt, Human
uuuaacaggacuuuuuauuggaacaauguacu

SEQ ID NO: 543762 - RNA, 32 nt, Human
uuuaacaguaauuccagccacaaucuuuagau

SEQ ID NO: 543763 - RNA, 32 nt, Human
uuuaacauaugaauuucuggggugggguuggg

SEQ ID NO: 543764 - RNA, 32 nt, Human
uuuaacaucaaaacaacaugcaaccaaaaacu

SEQ ID NO: 543765 - RNA, 32 nt, Human
uuuaacaucagccugggcaacauagcaggacc

SEQ ID NO: 543766 - RNA, 32 nt, Human
uuuaacaugccccugugaacagguauuuucag

SEQ ID NO: 543767 - RNA, 21 nt, Human
uuuaacaugucguguuuucga

SEQ ID NO: 543768 - RNA, 32 nt, Human
uuuaacauguuacugaagcauuugaauauaaa

SEQ ID NO: 543769 - RNA, 32 nt, Human
uuuaacauuaagugccuuugguucagaggggc

SEQ ID NO: 543770 - RNA, 32 nt, Human
uuuaacauucacauugcccugccucugucccc

SEQ ID NO: 543771 - RNA, 32 nt, Human
uuuaacauuuccucuuuccaagaccaaccuac

SEQ ID NO: 543772 - RNA, 32 nt, Human
uuuaaccaaaaggaaaucaucuggaagcagga

SEQ ID NO: 543773 - RNA, 32 nt, Human
uuuaaccacuugaacgcggaaguggcuuuccu

SEQ ID NO: 543774 - RNA, 32 nt, Human
uuuaaccagguacugucuaacaacagucaucu

SEQ ID NO: 543775 - RNA, 32 nt, Human
uuuaaccauggcgucccucuucaagaagagaa

SEQ ID NO: 543776 - RNA, 32 nt, Human
uuuaaccauguuggccaggauggucucgaucu

SEQ ID NO: 543777 - RNA, 32 nt, Human
uuuaaccauucccauguuguuaacuauuuagg

SEQ ID NO: 543778 - RNA, 32 nt, Human
uuuaacccagaagacaggcugcagugagccaa

SEQ ID NO: 543779 - RNA, 32 nt, Human
uuuaacccaggaggcagagguugcagugagcu

SEQ ID NO: 543780 - RNA, 20 nt, Human
uuuaacccauucaccaaaau

SEQ ID NO: 543781 - RNA, 32 nt, Human
uuuaaccccagcgcuauucauaacuuuuauga

SEQ ID NO: 543782 - RNA, 32 nt, Human
uuuaacccccgagggccuuggcugggucccag

SEQ ID NO: 543783 - RNA, 32 nt, Human
uuuaaccccuacucuguuuuacaacagaaaua

SEQ ID NO: 543784 - RNA, 32 nt, Human
uuuaacccgggagguggagguugcagugagcu

SEQ ID NO: 543785 - RNA, 32 nt, Human
uuuaacccuccccuucguguuucccccaaugu

SEQ ID NO: 543786 - RNA, 32 nt, Human
uuuaacccugcaggacuucucacgauguuuaa

SEQ ID NO: 543787 - RNA, 32 nt, Human
uuuaaccugaaccuugagcaaauuaguugguu

SEQ ID NO: 543788 - RNA, 32 nt, Human
uuuaaccugacugucuaaaaauucccagcuaa

SEQ ID NO: 543789 - RNA, 32 nt, Human
uuuaaccugcagacuucuguugacucauacuc

SEQ ID NO: 543790 - RNA, 32 nt, Human
uuuaaccugcagcugucugucugggacuggga

SEQ ID NO: 543791 - RNA, 32 nt, Human
uuuaaccuuaacuguuguuuuggacuugaacu

SEQ ID NO: 543792 - RNA, 32 nt, Human
uuuaacgaguucuuacugaucauuccacuugu

SEQ ID NO: 543793 - RNA, 32 nt, Human
uuuaacggaguaucacucugucacucaggcug

SEQ ID NO: 543794 - RNA, 32 nt, Human
uuuaacguuaaugcaccucugccuccacgaaa

SEQ ID NO: 543795 - RNA, 32 nt, Human
uuuaacguuguagggccugcccauggagcgga

SEQ ID NO: 543796 - RNA, 32 nt, Human
uuuaacuacaucugccucggcucacaaauucc

SEQ ID NO: 543797 - RNA, 32 nt, Human
uuuaacuaccugcuucccaggcguccaugaca

SEQ ID NO: 543798 - RNA, 32 nt, Human
uuuaacuacuggcaaagcacuugcauuuuuca

SEQ ID NO: 543799 - RNA, 32 nt, Human
uuuaacuauugucauuugccucuuucacauca

SEQ ID NO: 543800 - RNA, 32 nt, Human
uuuaacucaacaauaccugcuucccaauuacu

SEQ ID NO: 543801 - RNA, 32 nt, Human
uuuaacucaagacccucccaaccaaaaucgag

SEQ ID NO: 543802 - RNA, 32 nt, Human
uuuaacucagaaaaguaaagacaggaaauaac

SEQ ID NO: 543803 - RNA, 32 nt, Human
uuuaacucaggacuccagcccauugguagacg

SEQ ID NO: 543804 - RNA, 32 nt, Human
uuuaacucagguacuccagucuucaccccaac

SEQ ID NO: 543805 - RNA, 32 nt, Human
uuuaacuccuccaggguggggucugggcagug

SEQ ID NO: 543806 - RNA, 32 nt, Human
uuuaacucuugcuucauagguguaccauuuaa

SEQ ID NO: 543807 - RNA, 18 nt, Human
uuuaacugaaucuuuaca

SEQ ID NO: 543808 - RNA, 32 nt, Human
uuuaacugauguaugaauauuaauacucuaaa

SEQ ID NO: 543809 - RNA, 32 nt, Human
uuuaacugcagccuugaacacacacaaaaaua

SEQ ID NO: 543810 - RNA, 32 nt, Human
uuuaacugccacucccuguccagacuuucggu

SEQ ID NO: 543811 - RNA, 32 nt, Human
uuuaacugcuuugucaaaauuaaacauuuugu

SEQ ID NO: 543812 - RNA, 32 nt, Human
uuuaacugguaacccagccuguggcgucaguc

SEQ ID NO: 543813 - RNA, 31 nt, Human
uuuaacuggugaagagaaaaaggcugaaaag

SEQ ID NO: 543814 - RNA, 32 nt, Human
uuuaacuguauccaauguguggauguuuuaag

SEQ ID NO: 543815 - RNA, 32 nt, Human
uuuaacuguccugagcuacaucacgcccacaa

SEQ ID NO: 543816 - RNA, 32 nt, Human
uuuaacugugugaccagcggaaacaggugugu

SEQ ID NO: 543817 - RNA, 32 nt, Human
uuuaacugugugaccuugggcaagucacuuaa

SEQ ID NO: 543818 - RNA, 32 nt, Human
uuuaacugugugaugucccguuagugagaccg

SEQ ID NO: 543819 - RNA, 32 nt, Human
uuuaacuuaaagaaauuuuaacgugagaaaau

SEQ ID NO: 543820 - RNA, 32 nt, Human
uuuaacuuaacucuuaccuauuuucugcagcu

SEQ ID NO: 543821 - RNA, 32 nt, Human
uuuaacuuaccugagagugagagauguguagg

SEQ ID NO: 543822 - RNA, 32 nt, Human
uuuaacuuaggcacaggagauccacuuuuaaa

SEQ ID NO: 543823 - RNA, 32 nt, Human
uuuaacuucacugcaauucuguuucccucauu

SEQ ID NO: 543824 - RNA, 32 nt, Human
uuuaacuuccaugagccaccaugcccggcccc

SEQ ID NO: 543825 - RNA, 23 nt, Human
uuuaacuucucaguuauuuguau

SEQ ID NO: 543826 - RNA, 32 nt, Human
uuuaacuugcaguauaucacagagccacucuu

SEQ ID NO: 543827 - RNA, 32 nt, Human
uuuaacuuggauuucucguuccagaaauugug

SEQ ID NO: 543828 - RNA, 32 nt, Human
uuuaacuuuagacaacuuacuacuuugauguc

SEQ ID NO: 543829 - RNA, 32 nt, Human
uuuaacuuucaucucuagggauguuuaacauu

SEQ ID NO: 543830 - RNA, 32 nt, Human
uuuaacuuucucugucucucuuccucagcaga

SEQ ID NO: 543831 - RNA, 23 nt, Human
uuuaagaaaacaucuuuauauua

SEQ ID NO: 543832 - RNA, 32 nt, Human
uuuaagaaaaugugggaauaccaaauguccuu

SEQ ID NO: 543833 - RNA, 32 nt, Human
uuuaagaaaccaguagcuagcugcuauuuaua

SEQ ID NO: 543834 - RNA, 32 nt, Human
uuuaagaaagagaaugaacuguggaauuuauu

SEQ ID NO: 543835 - RNA, 32 nt, Human
uuuaagaaauacaggugcaugaccaauuguca

SEQ ID NO: 543836 - RNA, 23 nt, Human
uuuaagaaaugccaauuauguca

SEQ ID NO: 543837 - RNA, 32 nt, Human
uuuaagaaccucucaaaacgaaacaagcaaau

SEQ ID NO: 543838 - RNA, 32 nt, Human
uuuaagaacugauguagaaugagggaggggaa

SEQ ID NO: 543839 - RNA, 32 nt, Human
uuuaagaagcauccucugccaagaccaaaagg

SEQ ID NO: 543840 - RNA, 21 nt, Human
uuuaagaauauaauuauguca

SEQ ID NO: 543841 - RNA, 32 nt, Human
uuuaagaaucuauuuccuuuccagucauuuca

SEQ ID NO: 543842 - RNA, 32 nt, Human
uuuaagaaugugccauggaaagugauaagaaa

SEQ ID NO: 543843 - RNA, 32 nt, Human
uuuaagacaaauucuguuaaucaacaagggcu

SEQ ID NO: 543844 - RNA, 32 nt, Human
uuuaagaccagccugaccaacauggagaaacc

SEQ ID NO: 543845 - RNA, 32 nt, Human
uuuaagaccagccugaccaacauggugaaacc

SEQ ID NO: 543846 - RNA, 24 nt, Human
uuuaagaccagccugagcaacaua

SEQ ID NO: 543847 - RNA, 24 nt, Human
uuuaagaccagccuggacaacaua

SEQ ID NO: 543848 - RNA, 32 nt, Human
uuuaagaccagccuggacaacauaggaagauc

SEQ ID NO: 543849 - RNA, 24 nt, Human
uuuaagaccagccuggccaacaug

SEQ ID NO: 543850 - RNA, 32 nt, Human
uuuaagaccagccuggccaacauggcaaaacc

SEQ ID NO: 543851 - RNA, 32 nt, Human
uuuaagaccagccuggccaacuuggugaaacc

SEQ ID NO: 543852 - RNA, 32 nt, Human
uuuaagaccagccugggcaacaaagugagacc

SEQ ID NO: 543853 - RNA, 32 nt, Human
uuuaagaccagccugggcaacacaggaugacc

SEQ ID NO: 543854 - RNA, 23 nt, Human
uuuaagaccagccugggcaacau

SEQ ID NO: 543855 - RNA, 24 nt, Human
uuuaagaccagccugggcaacaua

SEQ ID NO: 543856 - RNA, 32 nt, Human
uuuaagaccagccugggcaacauacagaaagc

SEQ ID NO: 543857 - RNA, 32 nt, Human
uuuaagaccagccugggcaacauagcaagacc

SEQ ID NO: 543858 - RNA, 24 nt, Human
uuuaagaccagccugggcaacaug

SEQ ID NO: 543859 - RNA, 32 nt, Human
uuuaagaccagccugggcaacauggugaagcc

SEQ ID NO: 543860 - RNA, 32 nt, Human
uuuaagaccagccugggcaacauugggagacu

SEQ ID NO: 543861 - RNA, 32 nt, Human
uuuaagaccagccugggcaagauagcaagacc

SEQ ID NO: 543862 - RNA, 32 nt, Human
uuuaagaccagcuugaccaacauggugaaacc

SEQ ID NO: 543863 - RNA, 32 nt, Human
uuuaagacccuaucacuccacagggaacuggu

SEQ ID NO: 543864 - RNA, 32 nt, Human
uuuaagaccugccugggcaacauagugagacc

SEQ ID NO: 543865 - RNA, 32 nt, Human
uuuaagaccuggccuggaauaaauacguuuug

SEQ ID NO: 543866 - RNA, 24 nt, Human
uuuaagacuagccuggccaacaug

SEQ ID NO: 543867 - RNA, 32 nt, Human
uuuaagacuagccuggccaacauggugaaacc

SEQ ID NO: 543868 - RNA, 21 nt, Human
uuuaagacuagccugggcgac

SEQ ID NO: 543869 - RNA, 32 nt, Human
uuuaagacuccagccaccccucuugggcucuc

SEQ ID NO: 543870 - RNA, 32 nt, Human
uuuaagacugaaagaaggagaauuucuaaccu

SEQ ID NO: 543871 - RNA, 32 nt, Human
uuuaagagaacuccaggacacaauucagcccg

SEQ ID NO: 543872 - RNA, 32 nt, Human
uuuaagagagggcugauuaucacagcccucuu

SEQ ID NO: 543873 - RNA, 32 nt, Human
uuuaagagauauuagagcaaguauuuaauuca

SEQ ID NO: 543874 - RNA, 32 nt, Human
uuuaagagaugagggagagagagccagagaca

SEQ ID NO: 543875 - RNA, 32 nt, Human
uuuaagagauggagucucucacucuguggccc

SEQ ID NO: 543876 - RNA, 32 nt, Human
uuuaagagauggggucucacuauguugcccag

SEQ ID NO: 543877 - RNA, 32 nt, Human
uuuaagagauuaaagugccagauggaguuuaa

SEQ ID NO: 543878 - RNA, 24 nt, Human
uuuaagagccacaaaauuguauca

SEQ ID NO: 543879 - RNA, 31 nt, Human
uuuaagaggaaauggacuggcauuuauggug

SEQ ID NO: 543880 - RNA, 32 nt, Human
uuuaagagggagagaggggaggcaaagcugaa

SEQ ID NO: 543881 - RNA, 32 nt, Human
uuuaagaggugcagccucuggaaguggaucaa

SEQ ID NO: 543882 - RNA, 32 nt, Human
uuuaagaucagccuggccaacauaaggagacc

SEQ ID NO: 543883 - RNA, 24 nt, Human
uuuaagaucagucugggcaauaug

SEQ ID NO: 543884 - RNA, 32 nt, Human
uuuaagauuauacaagugaagcauuaaaagag

SEQ ID NO: 543885 - RNA, 32 nt, Human
uuuaagcaaccagaauuccacacuguaggaag

SEQ ID NO: 543886 - RNA, 32 nt, Human
uuuaagcaaccuuugaauccagcucuagucag

SEQ ID NO: 543887 - RNA, 32 nt, Human
uuuaagcagcuuguaauuuauugaucuacaug

SEQ ID NO: 543888 - RNA, 32 nt, Human
uuuaagcaguuauuaccucagcauuuugacau

SEQ ID NO: 543889 - RNA, 32 nt, Human
uuuaagcaugaaugcguucuggaacacguuag

SEQ ID NO: 543890 - RNA, 32 nt, Human
uuuaagcaugcaccacaaucuccugcaagccu

SEQ ID NO: 543891 - RNA, 32 nt, Human
uuuaagcauguucaguggcagcuccccuccag

SEQ ID NO: 543892 - RNA, 32 nt, Human
uuuaagccacguaggaacuuucuugagggaua

SEQ ID NO: 543893 - RNA, 32 nt, Human
uuuaagccagggcuggagggcaaaggucauaa

SEQ ID NO: 543894 - RNA, 32 nt, Human
uuuaagccaguauuuguuccuguuuuacaaug

SEQ ID NO: 543895 - RNA, 32 nt, Human
uuuaagccaguuucagauuuacucugaaaugu

SEQ ID NO: 543896 - RNA, 32 nt, Human
uuuaagccaucguuccccuccugaacgguugc

SEQ ID NO: 543897 - RNA, 32 nt, Human
uuuaagccccugcaccuggaacuguguauuuu

SEQ ID NO: 543898 - RNA, 32 nt, Human
uuuaagccucauucuccuuuuguucauuuugg

SEQ ID NO: 543899 - RNA, 32 nt, Human
uuuaagccuuucuucugccaaggucaccagca

SEQ ID NO: 543900 - RNA, 19 nt, Human
uuuaagcuacuucugcagu

SEQ ID NO: 543901 - RNA, 32 nt, Human
uuuaagcuauauccccuugucauuccauugag

SEQ ID NO: 543902 - RNA, 32 nt, Human
uuuaagcugcugcugcauacacauuucacuuu

SEQ ID NO: 543903 - RNA, 32 nt, Human
uuuaagcugucugacauugaccuccuuucauu

SEQ ID NO: 543904 - RNA, 32 nt, Human
uuuaagcuguucugcagauugggguguuauua

SEQ ID NO: 543905 - RNA, 32 nt, Human
uuuaagcuucuaaaaugucaucuaucaagcac

SEQ ID NO: 543906 - RNA, 32 nt, Human
uuuaaggaaacuuuuuaauugugcaaaggaua

SEQ ID NO: 543907 - RNA, 32 nt, Human
uuuaaggaaaguuggagguguuuuaggauugc

SEQ ID NO: 543908 - RNA, 32 nt, Human
uuuaaggagcaaaucacuucugucacaguuau

SEQ ID NO: 543909 - RNA, 32 nt, Human
uuuaaggagugagagagauguguacauaucuu

SEQ ID NO: 543910 - RNA, 32 nt, Human
uuuaaggaguugguaaaaagcaguucaacucu

SEQ ID NO: 543911 - RNA, 32 nt, Human
uuuaaggcacauccuagauggagggaguggag

SEQ ID NO: 543912 - RNA, 32 nt, Human
uuuaaggcaguacuguuuagcacuuugauauu

SEQ ID NO: 543913 - RNA, 32 nt, Human
uuuaaggccagccugggcaacauagcaaaacc

SEQ ID NO: 543914 - RNA, 32 nt, Human
uuuaaggccggaguucaugaccagccugggca

SEQ ID NO: 543915 - RNA, 32 nt, Human
uuuaaggccucauuuuucuucucccaugugga

SEQ ID NO: 543916 - RNA, 32 nt, Human
uuuaaggccuucagaaguaaauaaaguagcag

SEQ ID NO: 543917 - RNA, 22 nt, Human
uuuaaggcuagccugggcaaca

SEQ ID NO: 543918 - RNA, 32 nt, Human
uuuaaggcugagugugguggcucaugccugua

SEQ ID NO: 543919 - RNA, 32 nt, Human
uuuaagggccaggaaaggaagcauucagggaa

SEQ ID NO: 543920 - RNA, 32 nt, Human
uuuaaggguaagaguggaaaacagauaguccc

SEQ ID NO: 543921 - RNA, 32 nt, Human
uuuaagggugcugacauaaaguauuacaaaaa

SEQ ID NO: 543922 - RNA, 32 nt, Human
uuuaaggguuccagcaucccagagccaaaaac

SEQ ID NO: 543923 - RNA, 32 nt, Human
uuuaaggugaucucauugaugguaguucucag

SEQ ID NO: 543924 - RNA, 32 nt, Human
uuuaaggugucuaguaagacagcagcaguauu

SEQ ID NO: 543925 - RNA, 32 nt, Human
uuuaagguuaucucccuuguucccugaacauc

SEQ ID NO: 543926 - RNA, 32 nt, Human
uuuaagguuggugucuuacucccuggaagccu

SEQ ID NO: 543927 - RNA, 32 nt, Human
uuuaagguuguuuuccccuaaaaggaccuuua

SEQ ID NO: 543928 - RNA, 32 nt, Human
uuuaaguaauaugccaaaucauggcagcaaaa

SEQ ID NO: 543929 - RNA, 32 nt, Human
uuuaaguaccugccccuucaccucucagacga

SEQ ID NO: 543930 - RNA, 32 nt, Human
uuuaaguacuaaauugggcagggcuuuuuagu

SEQ ID NO: 543931 - RNA, 32 nt, Human
uuuaaguagagacaaggucucacuacauugcc

SEQ ID NO: 543932 - RNA, 32 nt, Human
uuuaaguauugcuuuuuguucaggugacaaau

SEQ ID NO: 543933 - RNA, 32 nt, Human
uuuaagucagaaccuuaaacauguggauauuu

SEQ ID NO: 543934 - RNA, 32 nt, Human
uuuaagucaggguuaccccaucaggaggacau

SEQ ID NO: 543935 - RNA, 32 nt, Human
uuuaagucauuuucaccuuuaagcuucaguua

SEQ ID NO: 543936 - RNA, 32 nt, Human
uuuaaguccugcucuauuuuccugggcagguu

SEQ ID NO: 543937 - RNA, 32 nt, Human
uuuaagucuuccagucuuccaugugaacuuua

SEQ ID NO: 543938 - RNA, 32 nt, Human
uuuaagugacugugguuuaaagcacaaaugcc

SEQ ID NO: 543939 - RNA, 32 nt, Human
uuuaagugccauucgagaggaguuggaacugc

SEQ ID NO: 543940 - RNA, 22 nt, Human
uuuaagugcugcuucugucagu

SEQ ID NO: 543941 - RNA, 32 nt, Human
uuuaagugcuuuucuucuugcccacaaacuag

SEQ ID NO: 543942 - RNA, 32 nt, Human
uuuaaguggcuuucagcaaaccucagucauau

SEQ ID NO: 543943 - RNA, 32 nt, Human
uuuaagugggagaagggugggcaguuaucacu

SEQ ID NO: 543944 - RNA, 32 nt, Human
uuuaaguggggugggaaggggagcacaauuuc

SEQ ID NO: 543945 - RNA, 32 nt, Human
uuuaagugguagggcucacagacugugugaag

SEQ ID NO: 543946 - RNA, 32 nt, Human
uuuaaguggugagggagauggaagcugcaccc

SEQ ID NO: 543947 - RNA, 32 nt, Human
uuuaaguguguauguaaguguggguaugugug

SEQ ID NO: 543948 - RNA, 32 nt, Human
uuuaaguucaaaugaaugaaacaacuauuuuu

SEQ ID NO: 543949 - RNA, 32 nt, Human
uuuaaguuccacugcuguuccucuuaccuuga

SEQ ID NO: 543950 - RNA, 32 nt, Human
uuuaauaaaagcuuuuaauugagaaccuacua

SEQ ID NO: 543951 - RNA, 32 nt, Human
uuuaauaacaauauauagaauuguagacugau

SEQ ID NO: 543952 - RNA, 32 nt, Human
uuuaauaacagcuuaaaacacacaucguacag

SEQ ID NO: 543953 - RNA, 32 nt, Human
uuuaauaaguaggagagaagggaggauuuauu

SEQ ID NO: 543954 - RNA, 22 nt, Human
uuuaauacacuuguaacuugga

SEQ ID NO: 543955 - RNA, 32 nt, Human
uuuaauacaggacuuuuaaauggcaguauuuc

SEQ ID NO: 543956 - RNA, 32 nt, Human
uuuaauacaguauuuauuauaaacauuuagac

SEQ ID NO: 543957 - RNA, 32 nt, Human
uuuaauacaguguggcuggaacugaguauuuu

SEQ ID NO: 543958 - RNA, 32 nt, Human
uuuaauacccagagagaggagaucuuccaggu

SEQ ID NO: 543959 - RNA, 32 nt, Human
uuuaauacucagcaagacaaguuucucaaugc

SEQ ID NO: 543960 - RNA, 32 nt, Human
uuuaauacugaacuuuggccuacuuugugaua

SEQ ID NO: 543961 - RNA, 32 nt, Human
uuuaauacugcaacugcucccuuuugcccagu

SEQ ID NO: 543962 - RNA, 32 nt, Human
uuuaauagagaugguuucacuauguuggccag

SEQ ID NO: 543963 - RNA, 32 nt, Human
uuuaauagcaagacaaacauguauuaugaugg

SEQ ID NO: 543964 - RNA, 32 nt, Human
uuuaauaggaguacaauaaaacuguugucagc

SEQ ID NO: 543965 - RNA, 32 nt, Human
uuuaauaguugauggggugggggugaggucau

SEQ ID NO: 543966 - RNA, 31 nt, Human
uuuaauaguuuauuuucccucuugcuucuuc

SEQ ID NO: 543967 - RNA, 32 nt, Human
uuuaauauagcacucaucuuucaagagagggc

SEQ ID NO: 543968 - RNA, 32 nt, Human
uuuaauaucacacccaugcccuuugucagguu

SEQ ID NO: 543969 - RNA, 32 nt, Human
uuuaauaucuuaagacuuccccucaacaugcu

SEQ ID NO: 543970 - RNA, 32 nt, Human
uuuaauaugcacugucuugucuucccacgcaa

SEQ ID NO: 543971 - RNA, 32 nt, Human
uuuaauauucuugagcacuugaaaauacuuuu

SEQ ID NO: 543972 - RNA, 32 nt, Human
uuuaauauuguacaguauagaaaccuccgauu

SEQ ID NO: 543973 - RNA, 32 nt, Human
uuuaauauuuucuucuuuagcauagcacuguc

SEQ ID NO: 543974 - RNA, 32 nt, Human
uuuaaucaaacucuggucucacugccuuaucu

SEQ ID NO: 543975 - RNA, 32 nt, Human
uuuaaucaagagccgaaauuauuacccuucuc

SEQ ID NO: 543976 - RNA, 32 nt, Human
uuuaaucacagaauauuccuguucccacagaa

SEQ ID NO: 543977 - RNA, 32 nt, Human
uuuaaucaccuguuuacuugucuccauucuua

SEQ ID NO: 543978 - RNA, 32 nt, Human
uuuaaucagauaagugaguaaagcuuuuauuu

SEQ ID NO: 543979 - RNA, 25 nt, Human
uuuaaucagguguggcuaucugaga

SEQ ID NO: 543980 - RNA, 32 nt, Human
uuuaaucagguguggcuaucugagaaaucaac

SEQ ID NO: 543981 - RNA, 32 nt, Human
uuuaaucaguguagcuaugugcugcugcugcu

SEQ ID NO: 543982 - RNA, 32 nt, Human
uuuaaucaugaagagaaaauuaguagcauuuc

SEQ ID NO: 543983 - RNA, 32 nt, Human
uuuaaucaugccacauuguauacaugaucaaa

SEQ ID NO: 543984 - RNA, 32 nt, Human
uuuaaucaugcuguuuaaacuguuguggcaca

SEQ ID NO: 543985 - RNA, 32 nt, Human
uuuaauccacugcaaggcaccuagagagacug

SEQ ID NO: 543986 - RNA, 32 nt, Human
uuuaauccacugcauccaucuaggauuuauuu

SEQ ID NO: 543987 - RNA, 32 nt, Human
uuuaauccacuuccuuucuucuucuucuaaaa

SEQ ID NO: 543988 - RNA, 32 nt, Human
uuuaauccaugcccuccucucucccucccugc

SEQ ID NO: 543989 - RNA, 32 nt, Human
uuuaaucccacuauggacucagucuccuggaa

SEQ ID NO: 543990 - RNA, 32 nt, Human
uuuaauccgcugucugggugcauguccacagu

SEQ ID NO: 543991 - RNA, 32 nt, Human
uuuaauccucuauuuugcucuuccuuguccau

SEQ ID NO: 543992 - RNA, 32 nt, Human
uuuaaucgaagaugauuaaagcauucaguccu

SEQ ID NO: 543993 - RNA, 32 nt, Human
uuuaaucuaauaugucaugaucuuuaaccuaa

SEQ ID NO: 543994 - RNA, 32 nt, Human
uuuaaucuagcacauuuguguagcccuaauca

SEQ ID NO: 543995 - RNA, 32 nt, Human
uuuaaucucauggggaugagcucagagaagcu

SEQ ID NO: 543996 - RNA, 32 nt, Human
uuuaaucugugaaaauggagagcuggcuucag

SEQ ID NO: 543997 - RNA, 32 nt, Human
uuuaaugaaaagcagcccccaaaaucauuuuc

SEQ ID NO: 543998 - RNA, 32 nt, Human
uuuaaugacuccacuggcugagcuucugguag

SEQ ID NO: 543999 - RNA, 32 nt, Human
uuuaaugagaugauuuucuucaucucauaauu

SEQ ID NO: 544000 - RNA, 23 nt, Human
uuuaaugauggugaagaaauaau

SEQ ID NO: 544001 - RNA, 32 nt, Human
uuuaaugcacacauucacacagugguaacaga

SEQ ID NO: 544002 - RNA, 32 nt, Human
uuuaaugcuagucaguaugcaccaccacagga

SEQ ID NO: 544003 - RNA, 32 nt, Human
uuuaaugcuaguuuccaccaucuuucaaugau

SEQ ID NO: 544004 - RNA, 32 nt, Human
uuuaaugcuguggcaugggugaagaggagggg

SEQ ID NO: 544005 - RNA, 32 nt, Human
uuuaaugcuugcaaucugagcucuugaacaaa

SEQ ID NO: 544006 - RNA, 32 nt, Human
uuuaauggauccagagagccaaggucagaggg

SEQ ID NO: 544007 - RNA, 32 nt, Human
uuuaauggcaccugggugauucuucagcuaaa

SEQ ID NO: 544008 - RNA, 32 nt, Human
uuuaauggcagcagaaaacuugugugaaauuu

SEQ ID NO: 544009 - RNA, 32 nt, Human
uuuaaugggauugaaagcacuuuuaccacaug

SEQ ID NO: 544010 - RNA, 32 nt, Human
uuuaaugggcagguucuugcucucccaggcug

SEQ ID NO: 544011 - RNA, 32 nt, Human
uuuaaugggguuucacccaaauuguuuaaugc

SEQ ID NO: 544012 - RNA, 32 nt, Human
uuuaaugguuaagaacugugaaauuuacaaau

SEQ ID NO: 544013 - RNA, 32 nt, Human
uuuaauguaguuguuaaagguaugaauucaug

SEQ ID NO: 544014 - RNA, 32 nt, Human
uuuaauguauuuagaguuccucauguugcagg

SEQ ID NO: 544015 - RNA, 32 nt, Human
uuuaauguccuuuagaagugggagucuggugg

SEQ ID NO: 544016 - RNA, 32 nt, Human
uuuaaugucucauuccccuugaggccagcugc

SEQ ID NO: 544017 - RNA, 32 nt, Human
uuuaauguuaggcagaacacauucauucagac

SEQ ID NO: 544018 - RNA, 32 nt, Human
uuuaauguuaggucccuucuccagucuuuucc

SEQ ID NO: 544019 - RNA, 32 nt, Human
uuuaauguucugauacauuaggaugaaguuaa

SEQ ID NO: 544020 - RNA, 32 nt, Human
uuuaauuaauuaaguaucugggauuauucuuu

SEQ ID NO: 544021 - RNA, 32 nt, Human
uuuaauuagaaaacauuucuucucucuuugug

SEQ ID NO: 544022 - RNA, 32 nt, Human
uuuaauuauagagagcaaaaguauugaaagua

SEQ ID NO: 544023 - RNA, 32 nt, Human
uuuaauuauauuaugaauaaaauuguuauuuc

SEQ ID NO: 544024 - RNA, 32 nt, Human
uuuaauuauccucacauauacuccuccggcuu

SEQ ID NO: 544025 - RNA, 32 nt, Human
uuuaauucaaugauuaaauaaacagaugaccu

SEQ ID NO: 544026 - RNA, 32 nt, Human
uuuaauucacccauaugcuuucaaaucuagua

SEQ ID NO: 544027 - RNA, 32 nt, Human
uuuaauucacuacaaaaugugcuuguuauuga

SEQ ID NO: 544028 - RNA, 32 nt, Human
uuuaauuccaauaaaauuuucuucauuuuugu

SEQ ID NO: 544029 - RNA, 32 nt, Human
uuuaauuccagaguacuguccucuacucuaag

SEQ ID NO: 544030 - RNA, 32 nt, Human
uuuaauuccuccucugccaggguggguccugg

SEQ ID NO: 544031 - RNA, 32 nt, Human
uuuaauucugcuuccccuagggugauauuucc

SEQ ID NO: 544032 - RNA, 32 nt, Human
uuuaauucuucaaauagucauaugaaaacaua

SEQ ID NO: 544033 - RNA, 32 nt, Human
uuuaauucuucacgguaagaaaaugaaguucu

SEQ ID NO: 544034 - RNA, 32 nt, Human
uuuaauucuugcuuauacucagucuauucggu

SEQ ID NO: 544035 - RNA, 32 nt, Human
uuuaauugaauaagcugcaugugugcauacuu

SEQ ID NO: 544036 - RNA, 32 nt, Human
uuuaauuggccuugguccucacagcuccaaaa

SEQ ID NO: 544037 - RNA, 32 nt, Human
uuuaauuggcuggcuguaauuugcauugagag

SEQ ID NO: 544038 - RNA, 32 nt, Human
uuuaauuggcuuugugccuccugcuuuacaac

SEQ ID NO: 544039 - RNA, 32 nt, Human
uuuaauugucagccucuggcugugcauuggug

SEQ ID NO: 544040 - RNA, 32 nt, Human
uuuaauugucuggcuucucucuggacugggag

SEQ ID NO: 544041 - RNA, 32 nt, Human
uuuaauugugauuuuaucaccuuucccauuuc

SEQ ID NO: 544042 - RNA, 32 nt, Human
uuuaauuucacaaacaucaggcaauuuccagg

SEQ ID NO: 544043 - RNA, 32 nt, Human
uuuaauuucaguauguaagaacaaauauuuug

SEQ ID NO: 544044 - RNA, 32 nt, Human
uuuaauuucuguaauugggaaggaggguaaua

SEQ ID NO: 544045 - RNA, 32 nt, Human
uuuaauuucuucuucuuuuccuuuuggcaaag

SEQ ID NO: 544046 - RNA, 32 nt, Human
uuuaauuucuuuguaaaaaccucaaaagugag

SEQ ID NO: 544047 - RNA, 32 nt, Human
uuuaauuugcagccuuagcucuguggugucug

SEQ ID NO: 544048 - RNA, 32 nt, Human
uuuaauuugccucgggaaucgcugcuuccaga

SEQ ID NO: 544049 - RNA, 32 nt, Human
uuuaauuugguugaacauuugcugcuaauggg

SEQ ID NO: 544050 - RNA, 32 nt, Human
uuuaauuuuaauucuuaaaauuuccaugacua

SEQ ID NO: 544051 - RNA, 32 nt, Human
uuuaauuuuagccauucuucugccucauuucu

SEQ ID NO: 544052 - RNA, 32 nt, Human
uuuaauuuuauguaugaguauguauguuccug

SEQ ID NO: 544053 - RNA, 32 nt, Human
uuuaauuuucacaggcucaucugggagaagga

SEQ ID NO: 544054 - RNA, 32 nt, Human
uuuaauuuucaucauuccauggagauucaguc

SEQ ID NO: 544055 - RNA, 32 nt, Human
uuuaauuuuccaggaaauuguacagcauaaaa

SEQ ID NO: 544056 - RNA, 32 nt, Human
uuuaauuuugucagauucacacaugccacuau

SEQ ID NO: 544057 - RNA, 32 nt, Human
uuuaauuuuuaagaguguucaauccgagauga

SEQ ID NO: 544058 - RNA, 32 nt, Human
uuuaauuuuugcaaagaaaaguuugaagucaa

SEQ ID NO: 544059 - RNA, 32 nt, Human
uuuacaaaaacaggcggcaggcugggguuggu

SEQ ID NO: 544060 - RNA, 32 nt, Human
uuuacaaaaaggcaauaaggugguuuaugguu

SEQ ID NO: 544061 - RNA, 32 nt, Human
uuuacaaaaauggauacaauagaaauguaaaa

SEQ ID NO: 544062 - RNA, 32 nt, Human
uuuacaaagagguuuuaugaaaagaauaaaaa

SEQ ID NO: 544063 - RNA, 32 nt, Human
uuuacaaaggggaaugguucuccagugcagcc

SEQ ID NO: 544064 - RNA, 32 nt, Human
uuuacaaaguaguuuauucuuauuauacuuuc

SEQ ID NO: 544065 - RNA, 32 nt, Human
uuuacaaaguguucucagucugaacaggaacc

SEQ ID NO: 544066 - RNA, 32 nt, Human
uuuacaaauguucuguuuuggcugcuauuggu

SEQ ID NO: 544067 - RNA, 32 nt, Human
uuuacaacauugcuucuacauucuuacugguu

SEQ ID NO: 544068 - RNA, 32 nt, Human
uuuacaaccacugcacuaccugacucaggaau

SEQ ID NO: 544069 - RNA, 32 nt, Human
uuuacaacgagaugcugcucuccauagggaug

SEQ ID NO: 544070 - RNA, 31 nt, Human
uuuacaacuuauuuccaacauuuaaacucug

SEQ ID NO: 544071 - RNA, 32 nt, Human
uuuacaagaaaaucucugucucuucaacaaug

SEQ ID NO: 544072 - RNA, 32 nt, Human
uuuacaagacuuguuaaagaugucagagugcc

SEQ ID NO: 544073 - RNA, 32 nt, Human
uuuacaagagcuuuccucuccucucucuugcu

SEQ ID NO: 544074 - RNA, 32 nt, Human
uuuacaagcagagacucacuccaacccaaacu

SEQ ID NO: 544075 - RNA, 32 nt, Human
uuuacaaggaagcagacacaggccuaggagua

SEQ ID NO: 544076 - RNA, 32 nt, Human
uuuacaaguagaaauuauuccuuucagaguaa

SEQ ID NO: 544077 - RNA, 32 nt, Human
uuuacaaguuaggaagcagaggaucagagaug

SEQ ID NO: 544078 - RNA, 32 nt, Human
uuuacaauauagaugacauuuuaaaaauguaa

SEQ ID NO: 544079 - RNA, 32 nt, Human
uuuacacaaaccugaaaagauguugugucuug

SEQ ID NO: 544080 - RNA, 32 nt, Human
uuuacacaaauguaagaaauucuaccaaggag

SEQ ID NO: 544081 - RNA, 32 nt, Human
uuuacacaccacugcauuaacuagaacugcug

SEQ ID NO: 544082 - RNA, 32 nt, Human
uuuacacaccucgccucguucucucugcuggu

SEQ ID NO: 544083 - RNA, 32 nt, Human
uuuacacacuacacguauaaauauuguaacug

SEQ ID NO: 544084 - RNA, 32 nt, Human
uuuacacacuccuuucacuguagcuugacuaa

SEQ ID NO: 544085 - RNA, 32 nt, Human
uuuacacaguauaucacauuuuauccuuaaac

SEQ ID NO: 544086 - RNA, 32 nt, Human
uuuacacagugcuuuccagccuuuggugcuua

SEQ ID NO: 544087 - RNA, 32 nt, Human
uuuacacauaaauaguuauaucaaugucagcc

SEQ ID NO: 544088 - RNA, 32 nt, Human
uuuacaccacuaucuccguuccaucugggcuu

SEQ ID NO: 544089 - RNA, 32 nt, Human
uuuacaccacugcacuccagucuggaugacaa

SEQ ID NO: 544090 - RNA, 22 nt, Human
uuuacacccuguaauuuauuca

SEQ ID NO: 544091 - RNA, 32 nt, Human
uuuacacccuugauucuucuugaagcaucacu

SEQ ID NO: 544092 - RNA, 32 nt, Human
uuuacaccuaguuucuaauaagcauuuuauaa

SEQ ID NO: 544093 - RNA, 32 nt, Human
uuuacaccuguaaucccagcacuuugggaggc

SEQ ID NO: 544094 - RNA, 32 nt, Human
uuuacacuggccacagaugucaggauuaagaa

SEQ ID NO: 544095 - RNA, 32 nt, Human
uuuacacuguaacuuacuccugaaggaaggag

SEQ ID NO: 544096 - RNA, 32 nt, Human
uuuacacuucucucaacuaaaacaucugguua

SEQ ID NO: 544097 - RNA, 32 nt, Human
uuuacacuuguacaauuauguaguaaauguau

SEQ ID NO: 544098 - RNA, 32 nt, Human
uuuacagaaagccacagaggugcaacuugagg

SEQ ID NO: 544099 - RNA, 32 nt, Human
uuuacagagaaaaggcuugguggugggauuuu

SEQ ID NO: 544100 - RNA, 32 nt, Human
uuuacagagacacugcacagcuuacacuccug

SEQ ID NO: 544101 - RNA, 32 nt, Human
uuuacagagagaagaauugaaggcgggaaugc

SEQ ID NO: 544102 - RNA, 32 nt, Human
uuuacagagagaggaauuuaaaagaggacauc

SEQ ID NO: 544103 - RNA, 32 nt, Human
uuuacagagagggaaggagagcagaauauuuc

SEQ ID NO: 544104 - RNA, 32 nt, Human
uuuacagagggagcugucuccagacagcucca

SEQ ID NO: 544105 - RNA, 32 nt, Human
uuuacagaguaccugcucgggccagguaaaug

SEQ ID NO: 544106 - RNA, 32 nt, Human
uuuacagagucacagaucugucagccugggaa

SEQ ID NO: 544107 - RNA, 32 nt, Human
uuuacagauaucaaagcucagcucuuugaaac

SEQ ID NO: 544108 - RNA, 32 nt, Human
uuuacagaugcaugccaccacgcccagcuaau

SEQ ID NO: 544109 - RNA, 32 nt, Human
uuuacagauuauuaaauaaagcugcauauguc

SEQ ID NO: 544110 - RNA, 32 nt, Human
uuuacagcaauauguuuccacucucuuccuug

SEQ ID NO: 544111 - RNA, 32 nt, Human
uuuacagcauacaagcuucugcuccaguauga

SEQ ID NO: 544112 - RNA, 32 nt, Human
uuuacagccauuucuguucacacuuuucaccc

SEQ ID NO: 544113 - RNA, 32 nt, Human
uuuacagcccugcuacuuuugcuuuugaaucu

SEQ ID NO: 544114 - RNA, 32 nt, Human
uuuacagcuaugucuagguucuccgcucaggg

SEQ ID NO: 544115 - RNA, 32 nt, Human
uuuacagcucuccuccagcccugggcacauag

SEQ ID NO: 544116 - RNA, 32 nt, Human
uuuacagcucuggaacacuuuggggcugauuu

SEQ ID NO: 544117 - RNA, 32 nt, Human
uuuacagcuggaagggcagacggaggcaucuu

SEQ ID NO: 544118 - RNA, 32 nt, Human
uuuacagcuggagaucacuggaaaggugucuc

SEQ ID NO: 544119 - RNA, 32 nt, Human
uuuacagcuggccagugcagagcugcugcucu

SEQ ID NO: 544120 - RNA, 30 nt, Human
uuuacagcuucuguccugcuccugcaucuu

SEQ ID NO: 544121 - RNA, 23 nt, Human
uuuacagcuuuucuagagcagcu

SEQ ID NO: 544122 - RNA, 32 nt, Human
uuuacaggagaaagaggugauuauggagggaa

SEQ ID NO: 544123 - RNA, 32 nt, Human
uuuacaggagcagggaagagcaguagaggaug

SEQ ID NO: 544124 - RNA, 32 nt, Human
uuuacaggaggugagugugagucauuagagac

SEQ ID NO: 544125 - RNA, 32 nt, Human
uuuacaggcagaaugaguucaugugaaauuuc

SEQ ID NO: 544126 - RNA, 32 nt, Human
uuuacaggcaugagccaccacacccagcuccu

SEQ ID NO: 544127 - RNA, 32 nt, Human
uuuacaggcaugagccaccacgcccagccuuc

SEQ ID NO: 544128 - RNA, 32 nt, Human
uuuacaggcaugagccaccgcacccagccuac

SEQ ID NO: 544129 - RNA, 32 nt, Human
uuuacaggcaugagccaccgcgcccggccugu

SEQ ID NO: 544130 - RNA, 32 nt, Human
uuuacaggcggaaacuccucggcugcuuuuuc

SEQ ID NO: 544131 - RNA, 32 nt, Human
uuuacaggcgugagccaccgcgcccggccagu

SEQ ID NO: 544132 - RNA, 32 nt, Human
uuuacaggcgugagccaccgcgcccggccgaa

SEQ ID NO: 544133 - RNA, 32 nt, Human
uuuacaggcuugagccacgcguccggccugaa

SEQ ID NO: 544134 - RNA, 32 nt, Human
uuuacaggggagaaaaaugacaaaugacgucu

SEQ ID NO: 544135 - RNA, 22 nt, Human
uuuacaggucuucucuccaacu

SEQ ID NO: 544136 - RNA, 31 nt, Human
uuuacaggugagagauuugaagccuggggag

SEQ ID NO: 544137 - RNA, 32 nt, Human
uuuacaggugccugccagcacgcccagcuaau

SEQ ID NO: 544138 - RNA, 32 nt, Human
uuuacaggugugagccaccacaccaggccaga

SEQ ID NO: 544139 - RNA, 32 nt, Human
uuuacaggugugagccacugugcccagcucuc

SEQ ID NO: 544140 - RNA, 32 nt, Human
uuuacaggugugagccacugugccuaccagcu

SEQ ID NO: 544141 - RNA, 32 nt, Human
uuuacagguguuauuagcacaacugaagaacu

SEQ ID NO: 544142 - RNA, 22 nt, Human
uuuacagguucucuuaagcaau

SEQ ID NO: 544143 - RNA, 32 nt, Human
uuuacaguaggaaacgccaguaaacaacuuuu

SEQ ID NO: 544144 - RNA, 32 nt, Human
uuuacagugaggacucggccacugugucucug

SEQ ID NO: 544145 - RNA, 32 nt, Human
uuuacagugcagcauaaugccaugggcuuccg

SEQ ID NO: 544146 - RNA, 32 nt, Human
uuuacaguucaggccugcugugaaucuuugau

SEQ ID NO: 544147 - RNA, 32 nt, Human
uuuacaguucugcaguguaauggaggacgggc

SEQ ID NO: 544148 - RNA, 22 nt, Human
uuuacaguuugcuaaaucuuau

SEQ ID NO: 544149 - RNA, 32 nt, Human
uuuacaguuuugaauaaaagcauuuacaauuu

SEQ ID NO: 544150 - RNA, 32 nt, Human
uuuacaguuuugacaaaauacucuuauacacc

SEQ ID NO: 544151 - RNA, 24 nt, Human
uuuacauaauuaugaguuuguuca

SEQ ID NO: 544152 - RNA, 32 nt, Human
uuuacauacacauugcuucuaguuggcagaaa

SEQ ID NO: 544153 - RNA, 32 nt, Human
uuuacauacauuuucuccacuucuaauuguga

SEQ ID NO: 544154 - RNA, 32 nt, Human
uuuacauacguugucuagaaguaccauagggu

SEQ ID NO: 544155 - RNA, 32 nt, Human
uuuacauagcuaugaucguuguguacauucuc

SEQ ID NO: 544156 - RNA, 32 nt, Human
uuuacauaggaaauguacugugggaacuauuc

SEQ ID NO: 544157 - RNA, 32 nt, Human
uuuacauauaauaaauagaaauuuuguuaaca

SEQ ID NO: 544158 - RNA, 32 nt, Human
uuuacauauacccaguaucuuugcacaaacca

SEQ ID NO: 544159 - RNA, 32 nt, Human
uuuacaucauuucucauccucacaacaauccu

SEQ ID NO: 544160 - RNA, 32 nt, Human
uuuacauccugcugcugauagguucaaggaau

SEQ ID NO: 544161 - RNA, 32 nt, Human
uuuacauccuuucuaaugacaaugaauggaau

SEQ ID NO: 544162 - RNA, 32 nt, Human
uuuacaucuccaaaggccagucccaaacacgc

SEQ ID NO: 544163 - RNA, 32 nt, Human
uuuacaucucucauggcugggcagcagcugug

SEQ ID NO: 544164 - RNA, 32 nt, Human
uuuacaucucugcaggccucacaugccgugac

SEQ ID NO: 544165 - RNA, 32 nt, Human
uuuacaucuugcucuucccagcauuccuuagg

SEQ ID NO: 544166 - RNA, 23 nt, Human
uuuacaugaacuguguuuguuca

SEQ ID NO: 544167 - RNA, 32 nt, Human
uuuacaugaagcauccagaaaagagaaaugua

SEQ ID NO: 544168 - RNA, 32 nt, Human
uuuacaugaauacacacacauauucacuaaac

SEQ ID NO: 544169 - RNA, 32 nt, Human
uuuacaugcaacccucucuucuugccucucaa

SEQ ID NO: 544170 - RNA, 30 nt, Human
uuuacaugcaugcaaucagacaggccacua

SEQ ID NO: 544171 - RNA, 32 nt, Human
uuuacaugccagccaucucugcaauuaaaguu

SEQ ID NO: 544172 - RNA, 32 nt, Human
uuuacauggauccauugccccagcuacuggag

SEQ ID NO: 544173 - RNA, 32 nt, Human
uuuacauucuugcucugcucaucuacacauau

SEQ ID NO: 544174 - RNA, 32 nt, Human
uuuacauuggagggccaauggcugguccuuca

SEQ ID NO: 544175 - RNA, 32 nt, Human
uuuacauuuaggaaagugaggcaaacaccuug

SEQ ID NO: 544176 - RNA, 25 nt, Human
uuuacauuuuagggcacaguucuuu

SEQ ID NO: 544177 - RNA, 22 nt, Human
uuuacauuuuugacaguuuuuu

SEQ ID NO: 544178 - RNA, 32 nt, Human
uuuaccaaaaauacaaaaauuagccaggugua

SEQ ID NO: 544179 - RNA, 19 nt, Human
uuuaccaaaacaaaacaga

SEQ ID NO: 544180 - RNA, 32 nt, Human
uuuaccaaaauacauguguaguugucacuuca

SEQ ID NO: 544181 - RNA, 32 nt, Human
uuuaccaacauguaucugucuacuuucucuug

SEQ ID NO: 544182 - RNA, 32 nt, Human
uuuaccaagagagaugucuccgggcccuuauu

SEQ ID NO: 544183 - RNA, 32 nt, Human
uuuaccaagcagggacuuugggccagguccgu

SEQ ID NO: 544184 - RNA, 32 nt, Human
uuuaccaaguugcuggaacuacaggcacgcac

SEQ ID NO: 544185 - RNA, 32 nt, Human
uuuaccaauagaguugaccuguuauuggauuu

SEQ ID NO: 544186 - RNA, 32 nt, Human
uuuaccaaugagccuuaauuuuuauauagguc

SEQ ID NO: 544187 - RNA, 32 nt, Human
uuuaccacauaaauguuuuaaauaucagauuu

SEQ ID NO: 544188 - RNA, 32 nt, Human
uuuaccaccucaacaggaacauugacuuguuu

SEQ ID NO: 544189 - RNA, 32 nt, Human
uuuaccacucaggcucuauuugugccuuagcu

SEQ ID NO: 544190 - RNA, 32 nt, Human
uuuaccacugaaagaagaucuaugaaaaugug

SEQ ID NO: 544191 - RNA, 32 nt, Human
uuuaccacugagcucugggaaggaggccagga

SEQ ID NO: 544192 - RNA, 32 nt, Human
uuuaccacugcacuccagcuugggcgacggag

SEQ ID NO: 544193 - RNA, 32 nt, Human
uuuaccagcauccugcuccacugccuuccucu

SEQ ID NO: 544194 - RNA, 32 nt, Human
uuuaccagccucaguguggaggcuccauccca

SEQ ID NO: 544195 - RNA, 32 nt, Human
  misc_feature (29)..(29): n is a, c, g, or u
uuuaccagcuucaaacuauguaaaggacnuuc

SEQ ID NO: 544196 - RNA, 32 nt, Human
uuuaccagcuuuuaaccaucugauaucuauag

SEQ ID NO: 544197 - RNA, 32 nt, Human
uuuaccaggaaggauggaaggggcuucagccu

SEQ ID NO: 544198 - RNA, 32 nt, Human
uuuaccaggagggcacauggaggaugcaagaa

SEQ ID NO: 544199 - RNA, 32 nt, Human
uuuaccaggggcagugccucucugcgggggag

SEQ ID NO: 544200 - RNA, 32 nt, Human
uuuaccagguaucugggcaucccuugguucac

SEQ ID NO: 544201 - RNA, 32 nt, Human
uuuaccagguccccuuccuacccuccaguccc

SEQ ID NO: 544202 - RNA, 32 nt, Human
uuuaccagucauuucuauuggaauuuguuuuu

SEQ ID NO: 544203 - RNA, 32 nt, Human
uuuaccagucugagugacagcuccccuuggcu

SEQ ID NO: 544204 - RNA, 32 nt, Human
uuuaccauauuucuaaacuuuguuuauaacuc

SEQ ID NO: 544205 - RNA, 32 nt, Human
uuuaccaucccgaagaaccaacuccuacaaau

SEQ ID NO: 544206 - RNA, 32 nt, Human
uuuaccaucccuccuucucuccuuccacagcu

SEQ ID NO: 544207 - RNA, 32 nt, Human
uuuaccaugccagauggacaccagcuucuuug

SEQ ID NO: 544208 - RNA, 32 nt, Human
uuuaccaugccccugacacugcacugagcacu

SEQ ID NO: 544209 - RNA, 32 nt, Human
uuuaccaugccuggaaauuuuacaggggaaga

SEQ ID NO: 544210 - RNA, 32 nt, Human
uuuaccauguaacuuaauguuugcaaggccag

SEQ ID NO: 544211 - RNA, 32 nt, Human
uuuaccaugugaguccugcaacacuaaagaua

SEQ ID NO: 544212 - RNA, 32 nt, Human
uuuaccauguggagggcaccaagcuauucaug

SEQ ID NO: 544213 - RNA, 32 nt, Human
uuuaccauucugaaaauuuuaaaacaagaauu

SEQ ID NO: 544214 - RNA, 32 nt, Human
uuuaccauucuuccacugugcuguuauaaagu

SEQ ID NO: 544215 - RNA, 32 nt, Human
uuuaccauugagagucaaugaaguugcuauuu

SEQ ID NO: 544216 - RNA, 32 nt, Human
uuuacccaaacaguaccccacacugcaagagg

SEQ ID NO: 544217 - RNA, 32 nt, Human
uuuacccaaauuugaacuagucuguuggguug

SEQ ID NO: 544218 - RNA, 32 nt, Human
uuuacccacuucucaguuuauaaugggggaaa

SEQ ID NO: 544219 - RNA, 32 nt, Human
uuuacccacuucucuguaucugccuuucucug

SEQ ID NO: 544220 - RNA, 32 nt, Human
uuuacccagcaaaccccagcugcuucagcagc

SEQ ID NO: 544221 - RNA, 23 nt, Human
uuuacccaggcuggagugcaaug

SEQ ID NO: 544222 - RNA, 32 nt, Human
uuuacccagugggucccuucgaugcugagggu

SEQ ID NO: 544223 - RNA, 32 nt, Human
uuuacccaguucauuucuuucuggcauuugua

SEQ ID NO: 544224 - RNA, 18 nt, Human
uuuacccuccaggacagc

SEQ ID NO: 544225 - RNA, 32 nt, Human
uuuacccucccaggccccaacggcagcacuua

SEQ ID NO: 544226 - RNA, 32 nt, Human
uuuacccugcucccucucucugucccuaggcu

SEQ ID NO: 544227 - RNA, 32 nt, Human
uuuacccuuaagaguauguuacauuugauuac

SEQ ID NO: 544228 - RNA, 32 nt, Human
uuuacccuuguuuucccuuguuauggcucuuc

SEQ ID NO: 544229 - RNA, 24 nt, Human
uuuacccuuuaccuaacagacuaa

SEQ ID NO: 544230 - RNA, 32 nt, Human
uuuaccuaaucaagccugggcaauggcgggcg

SEQ ID NO: 544231 - RNA, 32 nt, Human
uuuaccuaccccagucuuuggaacccuaaaua

SEQ ID NO: 544232 - RNA, 32 nt, Human
uuuaccuacugaggcucaagccuucacaguga

SEQ ID NO: 544233 - RNA, 32 nt, Human
uuuaccuagucuccuuagaaauggagucccca

SEQ ID NO: 544234 - RNA, 32 nt, Human
uuuaccuauggcaugagagagauggcuauggc

SEQ ID NO: 544235 - RNA, 30 nt, Human
uuuaccuauugcuguaagaaaugacgaucc

SEQ ID NO: 544236 - RNA, 32 nt, Human
uuuaccuccauaagaauagggaaaguagaaca

SEQ ID NO: 544237 - RNA, 32 nt, Human
uuuaccucccucacagagucacugugaggauu

SEQ ID NO: 544238 - RNA, 32 nt, Human
uuuaccuccuuuucucuuucacggggccguga

SEQ ID NO: 544239 - RNA, 31 nt, Human
uuuaccugccucucuuccuggaucgucucca

SEQ ID NO: 544240 - RNA, 32 nt, Human
uuuaccuggagcugagucaauuuagagagcug

SEQ ID NO: 544241 - RNA, 32 nt, Human
uuuaccuggguuugagccuacagucuauuuau

SEQ ID NO: 544242 - RNA, 32 nt, Human
uuuaccuguuaguuggaaguacccagaauuau

SEQ ID NO: 544243 - RNA, 32 nt, Human
uuuaccuuacucuguuuagaaaaguauacaag

SEQ ID NO: 544244 - RNA, 32 nt, Human
uuuaccuuacuuuuguugcaaucacuguuguu

SEQ ID NO: 544245 - RNA, 22 nt, Human
uuuaccuuauuaguguuaccaa

SEQ ID NO: 544246 - RNA, 32 nt, Human
uuuaccuuccuccaaauuacccaacauacggu

SEQ ID NO: 544247 - RNA, 32 nt, Human
uuuaccuuccuucccuuccugcucccagacag

SEQ ID NO: 544248 - RNA, 32 nt, Human
uuuaccuuccuucuccucuguauucuuacaga

SEQ ID NO: 544249 - RNA, 32 nt, Human
uuuaccuucucaucuucuuauuuuccaaauua

SEQ ID NO: 544250 - RNA, 32 nt, Human
uuuaccuuguugggugcuggauauuucuguau

SEQ ID NO: 544251 - RNA, 23 nt, Human
uuuaccuuuaccuauagccugga

SEQ ID NO: 544252 - RNA, 21 nt, Human
uuuaccuuuacuuggcuuaga

SEQ ID NO: 544253 - RNA, 23 nt, Human
uuuaccuuugcauaaguguuuga

SEQ ID NO: 544254 - RNA, 32 nt, Human
uuuaccuuuggggcugagccaagugcaucucu

SEQ ID NO: 544255 - RNA, 32 nt, Human
uuuaccuuuugaggaggaugagcgggaggugg

SEQ ID NO: 544256 - RNA, 32 nt, Human
uuuacgagguaucagcacuuuucuuucauuag

SEQ ID NO: 544257 - RNA, 32 nt, Human
uuuacgccuguaaucccagcacugugggaggc

SEQ ID NO: 544258 - RNA, 32 nt, Human
uuuacggaagggggaaacagaaaacagccucc

SEQ ID NO: 544259 - RNA, 32 nt, Human
uuuacggcaguguggcuggagccgcggcugac

SEQ ID NO: 544260 - RNA, 32 nt, Human
uuuacgggaucugcuaguggcuugccuacuua

SEQ ID NO: 544261 - RNA, 23 nt, Human
uuuacgggcacggugugguguca

SEQ ID NO: 544262 - RNA, 32 nt, Human
uuuacggucugucaguaaagaaaacaaaaacu

SEQ ID NO: 544263 - RNA, 32 nt, Human
uuuacgguuuuccagguuuaagcuguuacugu

SEQ ID NO: 544264 - RNA, 32 nt, Human
uuuacguaccaaugcuacucugcuguucacaa

SEQ ID NO: 544265 - RNA, 32 nt, Human
uuuacguacuggaggaaaguguguaaaaccau

SEQ ID NO: 544266 - RNA, 22 nt, Human
uuuacguauauuacaguucuuu

SEQ ID NO: 544267 - RNA, 32 nt, Human
uuuacgugugugaaaacugaagcacagaagaa

SEQ ID NO: 544268 - RNA, 32 nt, Human
uuuacguuacacuaaaaccacaugugcaacaa

SEQ ID NO: 544269 - RNA, 32 nt, Human
uuuacuaaaaacauuccagucuuggccgggug

SEQ ID NO: 544270 - RNA, 32 nt, Human
uuuacuaaaaauacaaaaauuagccaggcaug

SEQ ID NO: 544271 - RNA, 32 nt, Human
uuuacuaaaaauacaaaaauuagccaggcgca

SEQ ID NO: 544272 - RNA, 32 nt, Human
uuuacuaaaaauacaaaaauuagccaggcgug

SEQ ID NO: 544273 - RNA, 32 nt, Human
uuuacuaaaaauacaaaaauuagccgggcaug

SEQ ID NO: 544274 - RNA, 32 nt, Human
uuuacuaaaaauacaaaaauuagccgggcgug

SEQ ID NO: 544275 - RNA, 32 nt, Human
uuuacuaaaaauacaaaaauuagucaggcaug

SEQ ID NO: 544276 - RNA, 32 nt, Human
uuuacuaaaaauacaaaauuagccaggcaugg

SEQ ID NO: 544277 - RNA, 32 nt, Human
uuuacuaaaaauacaaaauuagccaggugugg

SEQ ID NO: 544278 - RNA, 32 nt, Human
uuuacuaaaccacacugaagcuauaguaccuu

SEQ ID NO: 544279 - RNA, 32 nt, Human
uuuacuaacauacucauucuucacaaaauucu

SEQ ID NO: 544280 - RNA, 32 nt, Human
uuuacuaagcuggcuggacucaugaucacuga

SEQ ID NO: 544281 - RNA, 32 nt, Human
uuuacuaaggagaugugcaaugcugaaguuag

SEQ ID NO: 544282 - RNA, 32 nt, Human
uuuacuacaaugaggugcauacccccagcgug

SEQ ID NO: 544283 - RNA, 32 nt, Human
uuuacuacacacacaguguuaacaaagcacug

SEQ ID NO: 544284 - RNA, 32 nt, Human
uuuacuaccaguuaaagagggagaacggagga

SEQ ID NO: 544285 - RNA, 32 nt, Human
uuuacuagacaggguuucaccauguuggcuag

SEQ ID NO: 544286 - RNA, 31 nt, Human
uuuacuagcgcaauacugcacuuguaaauga

SEQ ID NO: 544287 - RNA, 32 nt, Human
uuuacuagcuuuuucauugucuuuccaugaaa

SEQ ID NO: 544288 - RNA, 32 nt, Human
uuuacuauaaaacagaaagcaugugaaaacau

SEQ ID NO: 544289 - RNA, 32 nt, Human
uuuacuauagcuauuuuuaaaguuucucuacu

SEQ ID NO: 544290 - RNA, 32 nt, Human
uuuacuauauuuaaaugcauugguuaaguuua

SEQ ID NO: 544291 - RNA, 32 nt, Human
uuuacuauucucauguauuucauuucacacac

SEQ ID NO: 544292 - RNA, 32 nt, Human
uuuacucacaccaugcccuuugugccuuggug

SEQ ID NO: 544293 - RNA, 32 nt, Human
uuuacucacaucuucauucucuaaccacucua

SEQ ID NO: 544294 - RNA, 32 nt, Human
uuuacucagugacuguuguagcauuuuccugu

SEQ ID NO: 544295 - RNA, 32 nt, Human
uuuacucccaagacuucauugucccucuucac

SEQ ID NO: 544296 - RNA, 32 nt, Human
uuuacucccuaggaaaugcacaauuuuucugg

SEQ ID NO: 544297 - RNA, 32 nt, Human
uuuacucccugagaguccccuuucccuuucuu

SEQ ID NO: 544298 - RNA, 21 nt, Human
uuuacucucagcagcagccaa

SEQ ID NO: 544299 - RNA, 32 nt, Human
uuuacucugaaaugcaguggcauaaucucagc

SEQ ID NO: 544300 - RNA, 32 nt, Human
uuuacucugaguugacaggcgaugaucugaca

SEQ ID NO: 544301 - RNA, 32 nt, Human
uuuacucugccucaccaaacacaugcuaggau

SEQ ID NO: 544302 - RNA, 32 nt, Human
uuuacucuggaaaguguggggauggagaggau

SEQ ID NO: 544303 - RNA, 32 nt, Human
uuuacucuggauuccuccucuaccauauccgc

SEQ ID NO: 544304 - RNA, 32 nt, Human
uuuacucugggugagagauaaaucuuauaggg

SEQ ID NO: 544305 - RNA, 32 nt, Human
uuuacucuguuuacacauuuugcacuugggag

SEQ ID NO: 544306 - RNA, 32 nt, Human
uuuacucuucaggagcuuggcaucauggacug

SEQ ID NO: 544307 - RNA, 32 nt, Human
uuuacucuuuacaaaaaguaaagugagaaucc

SEQ ID NO: 544308 - RNA, 32 nt, Human
uuuacugacauggagugaagugcaauauuaua

SEQ ID NO: 544309 - RNA, 32 nt, Human
uuuacugauuuaauauuacaguguaagaaugu

SEQ ID NO: 544310 - RNA, 31 nt, Human
uuuacugcacuuucugaccaggagcuacuuu

SEQ ID NO: 544311 - RNA, 32 nt, Human
uuuacugcccuucacccaaccucucccaccuc

SEQ ID NO: 544312 - RNA, 32 nt, Human
uuuacugcucagaaccucuacuucucaucugc

SEQ ID NO: 544313 - RNA, 32 nt, Human
uuuacugcucagaauuuggagggagggagcag

SEQ ID NO: 544314 - RNA, 21 nt, Human
uuuacugcuuuguccauugga

SEQ ID NO: 544315 - RNA, 32 nt, Human
uuuacuggaagcaacaggaacuucuuaauggg

SEQ ID NO: 544316 - RNA, 32 nt, Human
uuuacuggccuacaaaucuaccuucauuccgu

SEQ ID NO: 544317 - RNA, 32 nt, Human
uuuacugggcaggcuuccuuccuccuggugau

SEQ ID NO: 544318 - RNA, 23 nt, Human
uuuacugggcgguuuccauuuga

SEQ ID NO: 544319 - RNA, 22 nt, Human
uuuacugguaguguccucauuc

SEQ ID NO: 544320 - RNA, 23 nt, Human
uuuacugguaguguucugauuug

SEQ ID NO: 544321 - RNA, 32 nt, Human
uuuacugguucagcaaaagccaggaagaacaa

SEQ ID NO: 544322 - RNA, 31 nt, Human
uuuacuguaccuucuuuauguuuagauaugc

SEQ ID NO: 544323 - RNA, 32 nt, Human
uuuacuguauuuuugcaugguuccuuguauug

SEQ ID NO: 544324 - RNA, 32 nt, Human
uuuacuguauuuuugugucuggucuucccuuu

SEQ ID NO: 544325 - RNA, 32 nt, Human
uuuacugucauugucugguuucugucccaguu

SEQ ID NO: 544326 - RNA, 32 nt, Human
uuuacugugaaaugucuaacuuugccagugcu

SEQ ID NO: 544327 - RNA, 32 nt, Human
uuuacugugagcuuuugccugccugugcuauu

SEQ ID NO: 544328 - RNA, 32 nt, Human
uuuacugugauucagagccacagucuaacuga

SEQ ID NO: 544329 - RNA, 32 nt, Human
uuuacugugugggguggcugggagacagacuu

SEQ ID NO: 544330 - RNA, 32 nt, Human
uuuacuuaacaaguaaccaguaguucaucaaa

SEQ ID NO: 544331 - RNA, 32 nt, Human
uuuacuuacauacagugacucuccagauuuua

SEQ ID NO: 544332 - RNA, 32 nt, Human
uuuacuuagugcucugaauuuacuuuuacagu

SEQ ID NO: 544333 - RNA, 32 nt, Human
uuuacuuauucacaugaaguucaaugucuugu

SEQ ID NO: 544334 - RNA, 32 nt, Human
uuuacuucaauuuuucuuuuucuauguacugg

SEQ ID NO: 544335 - RNA, 32 nt, Human
uuuacuucaguagugagggcaaugagaagcuu

SEQ ID NO: 544336 - RNA, 32 nt, Human
uuuacuucauuucaaaacuauuuccaaucaca

SEQ ID NO: 544337 - RNA, 32 nt, Human
uuuacuuccagcaucugagcucuggcucucac

SEQ ID NO: 544338 - RNA, 32 nt, Human
uuuacuuccauguggaaaaccuucaaauaaaa

SEQ ID NO: 544339 - RNA, 32 nt, Human
uuuacuuccuaauggaugugauuugcagauuu

SEQ ID NO: 544340 - RNA, 32 nt, Human
uuuacuuccucuuuucuaaucugagagguuuc

SEQ ID NO: 544341 - RNA, 32 nt, Human
uuuacuucuaucgacgcugugccuauuuguuc

SEQ ID NO: 544342 - RNA, 32 nt, Human
uuuacuucuucauucugggauauugugaaaag

SEQ ID NO: 544343 - RNA, 32 nt, Human
uuuacuugaaucugguuggccacuccucuacc

SEQ ID NO: 544344 - RNA, 32 nt, Human
uuuacuugacaggguuucaccauguuggcuag

SEQ ID NO: 544345 - RNA, 32 nt, Human
uuuacuugagcuguggucacagcugccaggua

SEQ ID NO: 544346 - RNA, 32 nt, Human
uuuacuugcuucaugauuaguaccaaaccacu

SEQ ID NO: 544347 - RNA, 32 nt, Human
uuuacuugggacagagcucuacccacaagggc

SEQ ID NO: 544348 - RNA, 32 nt, Human
uuuacuuuacauccuaaaacugccuuuuccua

SEQ ID NO: 544349 - RNA, 32 nt, Human
uuuacuuuccagaugaagagcugagccugauu

SEQ ID NO: 544350 - RNA, 32 nt, Human
uuuacuuuccauaugaauacaguggcuagguu

SEQ ID NO: 544351 - RNA, 32 nt, Human
uuuacuuucccuuuuucuaucaccuuaugucc

SEQ ID NO: 544352 - RNA, 21 nt, Human
uuuacuuucuacaggagccaa

SEQ ID NO: 544353 - RNA, 32 nt, Human
uuuacuuugauggaucuggccagagggguguu

SEQ ID NO: 544354 - RNA, 32 nt, Human
uuuacuuugcauuugauugcugugaagaugaa

SEQ ID NO: 544355 - RNA, 32 nt, Human
uuuacuuuggacuguccuuccuaaagaugcuc

SEQ ID NO: 544356 - RNA, 32 nt, Human
uuuacuuuguggaaguuguacuuuccagaaua

SEQ ID NO: 544357 - RNA, 32 nt, Human
uuuacuuuuaauguagcacagaauaguuuuaa

SEQ ID NO: 544358 - RNA, 32 nt, Human
uuuacuuuugauuaagaaaacacuuaaccuuc

SEQ ID NO: 544359 - RNA, 32 nt, Human
uuuacuuuugcacuuggagcugcuuuuaauuu

SEQ ID NO: 544360 - RNA, 32 nt, Human
uuuacuuuuguggagcauuagagucacaguuu

SEQ ID NO: 544361 - RNA, 32 nt, Human
uuuagaaaaaggugaugcauccuccucacaua

SEQ ID NO: 544362 - RNA, 32 nt, Human
uuuagaaaauauaaaccuuagaauggugaaga

SEQ ID NO: 544363 - RNA, 32 nt, Human
uuuagaaaaugagagaauucugauuggcuagu

SEQ ID NO: 544364 - RNA, 32 nt, Human
uuuagaaaaugagaugcaggauucaaggaaga

SEQ ID NO: 544365 - RNA, 32 nt, Human
uuuagaaaaugcugauuugagaacaaaaggaa

SEQ ID NO: 544366 - RNA, 32 nt, Human
uuuagaaacauguagacuaacgaaugacauaa

SEQ ID NO: 544367 - RNA, 32 nt, Human
uuuagaaacuggagagugaaggcauggaguga

SEQ ID NO: 544368 - RNA, 32 nt, Human
uuuagaaagcaugcauguaauguauguaugca

SEQ ID NO: 544369 - RNA, 32 nt, Human
uuuagaaagcauuugaaugcauuuuguuuggu

SEQ ID NO: 544370 - RNA, 32 nt, Human
uuuagaaaugcugcuagucacggugcagccuu

SEQ ID NO: 544371 - RNA, 32 nt, Human
uuuagaacagacauuucagucacugcauucuu

SEQ ID NO: 544372 - RNA, 32 nt, Human
uuuagaacagcauuguccucugaguugguuaa

SEQ ID NO: 544373 - RNA, 32 nt, Human
uuuagaacauuuuauuuauacugugaagacuu

SEQ ID NO: 544374 - RNA, 32 nt, Human
uuuagaaccaaaaauauucucucacagauuuc

SEQ ID NO: 544375 - RNA, 32 nt, Human
uuuagaacccuugucugcagccaguggggagu

SEQ ID NO: 544376 - RNA, 32 nt, Human
uuuagaaccugaccucaaggauauggcagcgc

SEQ ID NO: 544377 - RNA, 32 nt, Human
uuuagaacuaggguagaggcacuagagcacca

SEQ ID NO: 544378 - RNA, 32 nt, Human
uuuagaacugcaggagcucccugcugccucca

SEQ ID NO: 544379 - RNA, 32 nt, Human
uuuagaagacucuaccagacuguguauucauu

SEQ ID NO: 544380 - RNA, 19 nt, Human
uuuagaagcaguucuucca

SEQ ID NO: 544381 - RNA, 30 nt, Human
uuuagaagcuugcaaauuacagaaagaaua

SEQ ID NO: 544382 - RNA, 32 nt, Human
uuuagaaggcaccccugcccuccugaggucag

SEQ ID NO: 544383 - RNA, 32 nt, Human
uuuagaaguguaccuaucuaacaaacuauuau

SEQ ID NO: 544384 - RNA, 32 nt, Human
uuuagaauagugccuggcaugaaaugccuaug

SEQ ID NO: 544385 - RNA, 32 nt, Human
uuuagaaugaagacuggggaggaagcaucuua

SEQ ID NO: 544386 - RNA, 32 nt, Human
uuuagaaugaaugagucaccuugugauuuuua

SEQ ID NO: 544387 - RNA, 32 nt, Human
uuuagaaugcaauuuggcaaaaguaguaaaau

SEQ ID NO: 544388 - RNA, 32 nt, Human
uuuagaaugguucauacgucugcuuuguuugc

SEQ ID NO: 544389 - RNA, 32 nt, Human
uuuagacaaacauauauguauguaugaaugua

SEQ ID NO: 544390 - RNA, 32 nt, Human
uuuagacaaccugaaauuuauucacauauauc

SEQ ID NO: 544391 - RNA, 32 nt, Human
uuuagacaacuuggccagccgugguggcucac

SEQ ID NO: 544392 - RNA, 32 nt, Human
uuuagacaagagucucgcuuuguugcccaggc

SEQ ID NO: 544393 - RNA, 32 nt, Human
uuuagacaagcuugaaaacuugaaauuguuga

SEQ ID NO: 544394 - RNA, 32 nt, Human
uuuagacacaaaccuccccagcuccggccaag

SEQ ID NO: 544395 - RNA, 32 nt, Human
uuuagacacucucguucugucacccaggcugg

SEQ ID NO: 544396 - RNA, 32 nt, Human
uuuagacagaguuuugcucuuguugccuaggc

SEQ ID NO: 544397 - RNA, 32 nt, Human
uuuagacagcguuucgcucuuguugcccaggc

SEQ ID NO: 544398 - RNA, 32 nt, Human
uuuagacaggcagaccauggcagaguucuccc

SEQ ID NO: 544399 - RNA, 32 nt, Human
uuuagacaggucuuacucugucacccaggcug

SEQ ID NO: 544400 - RNA, 32 nt, Human
uuuagacauaugccaacuauauacgaccuuca

SEQ ID NO: 544401 - RNA, 32 nt, Human
uuuagacaucuucuacuugcucuuggccuuga

SEQ ID NO: 544402 - RNA, 32 nt, Human
uuuagaccagccugggcaacacaguaagaccc

SEQ ID NO: 544403 - RNA, 32 nt, Human
uuuagacccacugugccuucccggccucccgg

SEQ ID NO: 544404 - RNA, 32 nt, Human
uuuagacccccagggaaacagccuuccuggag

SEQ ID NO: 544405 - RNA, 32 nt, Human
uuuagacggaguuucacucuuguugcccaggc

SEQ ID NO: 544406 - RNA, 32 nt, Human
uuuagacggaguuuugcucuuguugcccaggc

SEQ ID NO: 544407 - RNA, 32 nt, Human
uuuagacuaggacuguucuacugugaagaaag

SEQ ID NO: 544408 - RNA, 32 nt, Human
uuuagacuauaucaaccuacaacuuuagucgg

SEQ ID NO: 544409 - RNA, 32 nt, Human
uuuagacucauuguaaguugccacugccaaca

SEQ ID NO: 544410 - RNA, 32 nt, Human
uuuagacucucucacagagguggcucacagag

SEQ ID NO: 544411 - RNA, 32 nt, Human
uuuagacugaaacuacacauuggcaaauagcg

SEQ ID NO: 544412 - RNA, 32 nt, Human
uuuagacugcugcugcucagcugguugcuuga

SEQ ID NO: 544413 - RNA, 32 nt, Human
uuuagacuggaccccacaauguuugcagagau

SEQ ID NO: 544414 - RNA, 32 nt, Human
uuuagacugggcaacagagcaagacccugucu

SEQ ID NO: 544415 - RNA, 32 nt, Human
uuuagacuucagcacgucacacauccugguug

SEQ ID NO: 544416 - RNA, 32 nt, Human
uuuagacuugauacaaggaaaaauucagcuug

SEQ ID NO: 544417 - RNA, 32 nt, Human
uuuagacuuuccaaaugcauccugcaaagaga

SEQ ID NO: 544418 - RNA, 25 nt, Human
uuuagagaacagccugguuaacaug

SEQ ID NO: 544419 - RNA, 32 nt, Human
uuuagagaacugguauagcuguggagagggag

SEQ ID NO: 544420 - RNA, 32 nt, Human
uuuagagaauggggguggggaggcaagaacca

SEQ ID NO: 544421 - RNA, 25 nt, Human
uuuagagaccagcccgggcaacaug

SEQ ID NO: 544422 - RNA, 32 nt, Human
uuuagagagcuuucggagaacagaacacuugg

SEQ ID NO: 544423 - RNA, 32 nt, Human
uuuagagaucugagcugucucuuaaaggggac

SEQ ID NO: 544424 - RNA, 32 nt, Human
uuuagagcaagaaaauucuguggccacccucu

SEQ ID NO: 544425 - RNA, 32 nt, Human
uuuagagcacugaaagaaacacaaagccagcc

SEQ ID NO: 544426 - RNA, 32 nt, Human
uuuagagcccgcgaagggcugucuccucgggc

SEQ ID NO: 544427 - RNA, 32 nt, Human
uuuagagccuuugauuuccuggacuggacuga

SEQ ID NO: 544428 - RNA, 32 nt, Human
uuuagagcugcuguagcuguuccuucacaaca

SEQ ID NO: 544429 - RNA, 32 nt, Human
uuuagaggaccuucccuaagggcgcagcuucg

SEQ ID NO: 544430 - RNA, 32 nt, Human
uuuagaggcccagcucaugcaucucauugccu

SEQ ID NO: 544431 - RNA, 32 nt, Human
uuuagaggcguuuuugaaaauguaaauagcau

SEQ ID NO: 544432 - RNA, 32 nt, Human
uuuagaggcuaugaagaaaacagcugcauggc

SEQ ID NO: 544433 - RNA, 32 nt, Human
uuuagaggcugaggcaggagaauugguugaac

SEQ ID NO: 544434 - RNA, 32 nt, Human
uuuagagggcagcagaggagcugucugaaaaa

SEQ ID NO: 544435 - RNA, 32 nt, Human
uuuagaggggcaggcuuaaauaaaggacuaaa

SEQ ID NO: 544436 - RNA, 32 nt, Human
uuuagaggguggcaguucacuucaccucucuu

SEQ ID NO: 544437 - RNA, 32 nt, Human
uuuagaguaagcuagccuuuugcacauuuaca

SEQ ID NO: 544438 - RNA, 32 nt, Human
uuuagagucaaaguaucucaaaccugaaucca

SEQ ID NO: 544439 - RNA, 32 nt, Human
uuuagagugaaaugaguccuauggucagacag

SEQ ID NO: 544440 - RNA, 32 nt, Human
uuuagaguguuucugggccaggauccgggccc

SEQ ID NO: 544441 - RNA, 32 nt, Human
uuuagaguuacaagccccuggaaaagggagca

SEQ ID NO: 544442 - RNA, 32 nt, Human
uuuagauauuuacuccccauuuuaugauccgg

SEQ ID NO: 544443 - RNA, 32 nt, Human
uuuagaucaagaaagcuguugaugaagacauu

SEQ ID NO: 544444 - RNA, 32 nt, Human
uuuagaucagcaccuggaauacaugacacauu

SEQ ID NO: 544445 - RNA, 32 nt, Human
uuuagauccaaucugacucucuugaaggacau

SEQ ID NO: 544446 - RNA, 32 nt, Human
uuuagaugacaaaaacaccagauugaaggaug

SEQ ID NO: 544447 - RNA, 32 nt, Human
uuuagaugaccucuuuccuuguuuuguuuuca

SEQ ID NO: 544448 - RNA, 32 nt, Human
uuuagaugagacagaguuucgcccuugucacc

SEQ ID NO: 544449 - RNA, 32 nt, Human
uuuagaugaggcaccugcggcccaaagaguca

SEQ ID NO: 544450 - RNA, 32 nt, Human
uuuagaugaucuauucaaagugugaauauuua

SEQ ID NO: 544451 - RNA, 32 nt, Human
uuuagaugcuucuggguuccaugggcgccuua

SEQ ID NO: 544452 - RNA, 32 nt, Human
uuuagauggaauuucacucuuguugcccaggc

SEQ ID NO: 544453 - RNA, 22 nt, Human
uuuagauggagccugggcaaca

SEQ ID NO: 544454 - RNA, 32 nt, Human
uuuagauggaguuucacucuuguugcccaggc

SEQ ID NO: 544455 - RNA, 32 nt, Human
uuuagauggaguuucuuuuugcccaggcugga

SEQ ID NO: 544456 - RNA, 32 nt, Human
uuuagauggaguuuggcucuugucacccaggc

SEQ ID NO: 544457 - RNA, 32 nt, Human
uuuagauggaguuuuacucuuguugcccaggc

SEQ ID NO: 544458 - RNA, 32 nt, Human
uuuagauguaguuuugcucuuguugcccaggc

SEQ ID NO: 544459 - RNA, 32 nt, Human
uuuagauguggacaguggguggacugggccca

SEQ ID NO: 544460 - RNA, 32 nt, Human
uuuagauguguaugaaauaccuguauacguua

SEQ ID NO: 544461 - RNA, 32 nt, Human
uuuagauucucccuguacuggaaagggauguc

SEQ ID NO: 544462 - RNA, 32 nt, Human
uuuagauuuaacagauagaguguggcuucauu

SEQ ID NO: 544463 - RNA, 32 nt, Human
uuuagcaaacauuugcuuuucuuuuuggaagu

SEQ ID NO: 544464 - RNA, 21 nt, Human
uuuagcaaagaacucuuaccu

SEQ ID NO: 544465 - RNA, 18 nt, Human
uuuagcaaccaagcauga

SEQ ID NO: 544466 - RNA, 32 nt, Human
uuuagcaagguaacaguugcccagggcaguac

SEQ ID NO: 544467 - RNA, 32 nt, Human
uuuagcaauaucaucaggucucuugcagaguu

SEQ ID NO: 544468 - RNA, 32 nt, Human
uuuagcaaucuuacgagugaaauguucuggug

SEQ ID NO: 544469 - RNA, 32 nt, Human
uuuagcaaugcagaaaggaauuuuuaaaaauc

SEQ ID NO: 544470 - RNA, 19 nt, Human
uuuagcaauuaaauucuag

SEQ ID NO: 544471 - RNA, 32 nt, Human
uuuagcacaaaccaagcacaaaaguccuccug

SEQ ID NO: 544472 - RNA, 32 nt, Human
uuuagcacaaagugccuucuguuucacagcug

SEQ ID NO: 544473 - RNA, 32 nt, Human
uuuagcacagauuuguuuauguguucagauuu

SEQ ID NO: 544474 - RNA, 32 nt, Human
uuuagcaccagggaaggggacaaggacuaggg

SEQ ID NO: 544475 - RNA, 32 nt, Human
uuuagcagacaggguuucaccauguuggccag

SEQ ID NO: 544476 - RNA, 32 nt, Human
uuuagcagcaucacuggccucuacccauuagc

SEQ ID NO: 544477 - RNA, 32 nt, Human
uuuagcagccaaggaugggaauuacacagcga

SEQ ID NO: 544478 - RNA, 32 nt, Human
uuuagcaggaggaucacuugagcccaggaguu

SEQ ID NO: 544479 - RNA, 32 nt, Human
uuuagcaggcugguguuaaggcuguaggagga

SEQ ID NO: 544480 - RNA, 32 nt, Human
uuuagcagugccucuguuuacaccauaagaug

SEQ ID NO: 544481 - RNA, 19 nt, Human
uuuagcaguguguaaagua

SEQ ID NO: 544482 - RNA, 32 nt, Human
uuuagcaguuuuugagaauguguuugauauca

SEQ ID NO: 544483 - RNA, 32 nt, Human
uuuagcauccaccaauuuucacugcauuuugc

SEQ ID NO: 544484 - RNA, 32 nt, Human
uuuagcaucucaaauuccaacugaaaucauuu

SEQ ID NO: 544485 - RNA, 32 nt, Human
uuuagcaucuucugucaugagaaguggcgauc

SEQ ID NO: 544486 - RNA, 32 nt, Human
uuuagcaucuucuuuaccuccaguguuccugc

SEQ ID NO: 544487 - RNA, 32 nt, Human
uuuagcaucuuuacagauggagaggacagagu

SEQ ID NO: 544488 - RNA, 32 nt, Human
uuuagcauuagcucugugugagcuccugccgg

SEQ ID NO: 544489 - RNA, 32 nt, Human
uuuagcauuaguccauuucugcugcuaacaau

SEQ ID NO: 544490 - RNA, 32 nt, Human
uuuagcauugucuuguucugucccuuccacuu

SEQ ID NO: 544491 - RNA, 32 nt, Human
uuuagccaaagaccuugaaaacuacaguugug

SEQ ID NO: 544492 - RNA, 32 nt, Human
uuuagccaaggaguucuagccugcagugaacu

SEQ ID NO: 544493 - RNA, 32 nt, Human
uuuagccaaugccacucaccaaaucuuugcac

SEQ ID NO: 544494 - RNA, 32 nt, Human
uuuagccaaugucuuccuagguggggcuagga

SEQ ID NO: 544495 - RNA, 32 nt, Human
uuuagccaauucgagggcuccuugugguggga

SEQ ID NO: 544496 - RNA, 32 nt, Human
uuuagccacagcuguuuuaagacuucugaucu

SEQ ID NO: 544497 - RNA, 32 nt, Human
uuuagccagagaaugguucaaaugucuuacag

SEQ ID NO: 544498 - RNA, 32 nt, Human
uuuagccagcagugcccugcccugcccugcag

SEQ ID NO: 544499 - RNA, 32 nt, Human
uuuagccaguuugccagcaagcgcauccuagc

SEQ ID NO: 544500 - RNA, 32 nt, Human
uuuagccaugccugcuccucugccuggaccag

SEQ ID NO: 544501 - RNA, 22 nt, Human
uuuagccauucugguucuaguc

SEQ ID NO: 544502 - RNA, 32 nt, Human
uuuagccauucuuaucuccucccuucagaucc

SEQ ID NO: 544503 - RNA, 32 nt, Human
uuuagcccaggaauucgagaccagccugggca

SEQ ID NO: 544504 - RNA, 32 nt, Human
uuuagcccaggagguccagaccagccugggca

SEQ ID NO: 544505 - RNA, 32 nt, Human
uuuagcccaggaguuaaagaccagccugggca

SEQ ID NO: 544506 - RNA, 32 nt, Human
uuuagcccaggaguuugaggcugcggugaguu

SEQ ID NO: 544507 - RNA, 32 nt, Human
uuuagcccaugaggaggaugugaccgggacug

SEQ ID NO: 544508 - RNA, 32 nt, Human
uuuagccccaaagcucuucuaguucucaccug

SEQ ID NO: 544509 - RNA, 32 nt, Human
uuuagcccccagcuucccagcaggcaacucaa

SEQ ID NO: 544510 - RNA, 32 nt, Human
uuuagcccguugucugucucuaguuucuuucu

SEQ ID NO: 544511 - RNA, 32 nt, Human
uuuagcccugcucuggcuucugcagcagcaga

SEQ ID NO: 544512 - RNA, 32 nt, Human
uuuagccugaaccuugaagguguuuguucaga

SEQ ID NO: 544513 - RNA, 24 nt, Human
uuuagccugcauggcagggagagg

SEQ ID NO: 544514 - RNA, 32 nt, Human
uuuagccugggcgacagagcgagaccuugucu

SEQ ID NO: 544515 - RNA, 32 nt, Human
uuuagccugggugaaaaagugagacccuaucu

SEQ ID NO: 544516 - RNA, 32 nt, Human
uuuagccugggugacagagcgagacucugucu

SEQ ID NO: 544517 - RNA, 32 nt, Human
uuuagcgagccuggagggaagggaaggcugag

SEQ ID NO: 544518 - RNA, 32 nt, Human
uuuagcggugaauuacuccuucuggcuaagag

SEQ ID NO: 544519 - RNA, 32 nt, Human
uuuagcgugcucacugaccugccuguagcccc

SEQ ID NO: 544520 - RNA, 32 nt, Human
uuuagcuacuaaaaauuucuauuaaaauuauu

SEQ ID NO: 544521 - RNA, 32 nt, Human
uuuagcuacuuuggggaggagggaaggugcug

SEQ ID NO: 544522 - RNA, 32 nt, Human
uuuagcuagaccuuugcuuccuucuugccagc

SEQ ID NO: 544523 - RNA, 32 nt, Human
uuuagcuaucaaccuaauuuuccucuuaguug

SEQ ID NO: 544524 - RNA, 32 nt, Human
uuuagcucuccucucaguugaaugcaaugcca

SEQ ID NO: 544525 - RNA, 32 nt, Human
uuuagcucuggcuuacucuucucuccaccauu

SEQ ID NO: 544526 - RNA, 32 nt, Human
uuuagcucuguggaauucagugacaaaauggg

SEQ ID NO: 544527 - RNA, 32 nt, Human
uuuagcugaagaauuguauuacauuuggagag

SEQ ID NO: 544528 - RNA, 32 nt, Human
uuuagcugcaguaucaauguggcauaaauacu

SEQ ID NO: 544529 - RNA, 32 nt, Human
uuuagcugcugccuccagccucuggcuugaga

SEQ ID NO: 544530 - RNA, 32 nt, Human
uuuagcuguaaaccaaguuggaagcuauucgg

SEQ ID NO: 544531 - RNA, 32 nt, Human
uuuagcuguagaucaagcuauuugggguguuu

SEQ ID NO: 544532 - RNA, 23 nt, Human
uuuagcuuagggggaggguggga

SEQ ID NO: 544533 - RNA, 32 nt, Human
uuuagcuuccugcuuauuguuacuggacauuu

SEQ ID NO: 544534 - RNA, 32 nt, Human
uuuagcuugccugcaggaucaggaaaguuuga

SEQ ID NO: 544535 - RNA, 32 nt, Human
uuuagcuuucagagagaaacagcaggauugcu

SEQ ID NO: 544536 - RNA, 32 nt, Human
uuuagcuuucucuccccucccuuugaaugaga

SEQ ID NO: 544537 - RNA, 32 nt, Human
uuuagcuuuuagauuuuuaugugucuuugaca

SEQ ID NO: 544538 - RNA, 32 nt, Human
uuuaggaaaaacaaaacaacagacuucauccu

SEQ ID NO: 544539 - RNA, 32 nt, Human
uuuaggaaacacacagcauacagacuuacccc

SEQ ID NO: 544540 - RNA, 32 nt, Human
uuuaggaacugagaaagaaccugccuaagcag

SEQ ID NO: 544541 - RNA, 32 nt, Human
uuuaggaagcauuugaaugcauuuuguuuggu

SEQ ID NO: 544542 - RNA, 32 nt, Human
uuuaggaaguaaaauuugcuucauggucauga

SEQ ID NO: 544543 - RNA, 32 nt, Human
uuuaggaauaagaugguagaauaccugacaga

SEQ ID NO: 544544 - RNA, 32 nt, Human
uuuaggaauauguaagaaacucaacacauaau

SEQ ID NO: 544545 - RNA, 32 nt, Human
uuuaggacacguuuaacuuucuaggccuccaa

SEQ ID NO: 544546 - RNA, 32 nt, Human
uuuaggaccaagccccuuaacaacucaggccu

SEQ ID NO: 544547 - RNA, 32 nt, Human
uuuaggacccccagaccugugaaggugggagc

SEQ ID NO: 544548 - RNA, 32 nt, Human
uuuaggaccugauggacaaagcaggagauuca

SEQ ID NO: 544549 - RNA, 32 nt, Human
uuuaggacgaaagaaguauggagcagugggau

SEQ ID NO: 544550 - RNA, 32 nt, Human
uuuaggacucagcagacccagcaagaggcauc

SEQ ID NO: 544551 - RNA, 31 nt, Human
uuuaggacuuuuccauagugccaaagccaua

SEQ ID NO: 544552 - RNA, 32 nt, Human
uuuaggagaaaagcuugcuucaggguccuuag

SEQ ID NO: 544553 - RNA, 32 nt, Human
uuuaggagaagaggagagacaggcaggaaagg

SEQ ID NO: 544554 - RNA, 32 nt, Human
uuuaggagagaacauuuaagccacucagguau

SEQ ID NO: 544555 - RNA, 32 nt, Human
uuuaggagauaaaaacagcuuuggggacuggu

SEQ ID NO: 544556 - RNA, 32 nt, Human
uuuaggagauuaucaagcugguugucauucau

SEQ ID NO: 544557 - RNA, 31 nt, Human
uuuaggagcuaaccuccacagaugcugauag

SEQ ID NO: 544558 - RNA, 32 nt, Human
uuuaggaguuugaauucuuacucucaucagac

SEQ ID NO: 544559 - RNA, 21 nt, Human
uuuaggaucagccuacgauau

SEQ ID NO: 544560 - RNA, 21 nt, Human
uuuaggaucaggcugaauaug

SEQ ID NO: 544561 - RNA, 32 nt, Human
uuuaggaugaaaacuaaaggacucauugccuu

SEQ ID NO: 544562 - RNA, 32 nt, Human
uuuaggauguacagccuaguguuaacauucuu

SEQ ID NO: 544563 - RNA, 32 nt, Human
uuuaggauuugagcuguucuggaacacauugc

SEQ ID NO: 544564 - RNA, 32 nt, Human
uuuaggcaacacauucucauuccugucauuau

SEQ ID NO: 544565 - RNA, 32 nt, Human
uuuaggcaccagugauuucacccuucugagcc

SEQ ID NO: 544566 - RNA, 32 nt, Human
uuuaggcacucaauaaauguugacuaauuuuu

SEQ ID NO: 544567 - RNA, 32 nt, Human
uuuaggcagagaacauucaugugucauaugug

SEQ ID NO: 544568 - RNA, 32 nt, Human
uuuaggcaggcuuccuggaacuacuguuuuac

SEQ ID NO: 544569 - RNA, 32 nt, Human
uuuaggcaugagccaccacaucuggccaauag

SEQ ID NO: 544570 - RNA, 32 nt, Human
uuuaggccagcucacauuuauuuggaaauuac

SEQ ID NO: 544571 - RNA, 20 nt, Human
uuuaggccccuuuccuuccc

SEQ ID NO: 544572 - RNA, 32 nt, Human
uuuaggccgcuagaccguaagcucuuugaguu

SEQ ID NO: 544573 - RNA, 32 nt, Human
uuuaggccucuggaugacugcgggcgggccug

SEQ ID NO: 544574 - RNA, 32 nt, Human
uuuaggcuauggguuugagaccagccuggcaa

SEQ ID NO: 544575 - RNA, 19 nt, Human
uuuaggcugggcgcagugg

SEQ ID NO: 544576 - RNA, 19 nt, Human
uuuaggcugggugcagugg

SEQ ID NO: 544577 - RNA, 32 nt, Human
uuuaggcuggucugggucauggggaagcgucc

SEQ ID NO: 544578 - RNA, 21 nt, Human
uuuaggcuucuuggcaacaua

SEQ ID NO: 544579 - RNA, 32 nt, Human
uuuaggcuugcagccacgguacggcagccgga

SEQ ID NO: 544580 - RNA, 32 nt, Human
uuuagggaacaggguugacacagcagggcuag

SEQ ID NO: 544581 - RNA, 32 nt, Human
uuuagggacuacccagauuacuccaggauaau

SEQ ID NO: 544582 - RNA, 32 nt, Human
uuuagggacuuguccugguucaucuuaguuaa

SEQ ID NO: 544583 - RNA, 32 nt, Human
uuuagggagaacgggaauucagacaagcugca

SEQ ID NO: 544584 - RNA, 32 nt, Human
uuuagggagcugggacaccugguccugcuagc

SEQ ID NO: 544585 - RNA, 20 nt, Human
uuuagggagggugacuggga

SEQ ID NO: 544586 - RNA, 32 nt, Human
uuuagggaguuaccuguuuucaucucgaggug

SEQ ID NO: 544587 - RNA, 32 nt, Human
uuuagggauacuuuguucucaccacugucccu

SEQ ID NO: 544588 - RNA, 32 nt, Human
uuuagggaugagacuggggcccagggaggggc

SEQ ID NO: 544589 - RNA, 27 nt, Human
uuuagggauugauugucugcuggggug

SEQ ID NO: 544590 - RNA, 21 nt, Human
uuuagggauuugcuugggaua

SEQ ID NO: 544591 - RNA, 32 nt, Human
uuuagggcagaugacacuuuuucccacccuuu

SEQ ID NO: 544592 - RNA, 31 nt, Human
uuuagggcauuuuucugacucaugaaaagag

SEQ ID NO: 544593 - RNA, 32 nt, Human
uuuagggcccuccccacccacacccacagguc

SEQ ID NO: 544594 - RNA, 32 nt, Human
uuuagggcccugauuugcugggcaguuuuucu

SEQ ID NO: 544595 - RNA, 32 nt, Human
uuuagggccuuaagccccugaggguccuggug

SEQ ID NO: 544596 - RNA, 32 nt, Human
uuuagggcuuaaaauaaauuaugguucuauga

SEQ ID NO: 544597 - RNA, 32 nt, Human
uuuagggcuuuguuacagaugugugaccaagg

SEQ ID NO: 544598 - RNA, 32 nt, Human
uuuaggggaacugucuuccuccgcaggcgcga

SEQ ID NO: 544599 - RNA, 32 nt, Human
uuuaggggacugagaaagcacaggcuucauga

SEQ ID NO: 544600 - RNA, 32 nt, Human
uuuaggggaggcaggcaggugggugagcagca

SEQ ID NO: 544601 - RNA, 32 nt, Human
uuuaggggagggcagaggccugcaguuuggcu

SEQ ID NO: 544602 - RNA, 32 nt, Human
uuuaggggauguggggaccaggagaaagucag

SEQ ID NO: 544603 - RNA, 24 nt, Human
uuuaggggccauauacuacauuau

SEQ ID NO: 544604 - RNA, 32 nt, Human
uuuaggggccgagacagguggaucaccugagg

SEQ ID NO: 544605 - RNA, 32 nt, Human
uuuagggggaaggugcuccaaagcccucuacu

SEQ ID NO: 544606 - RNA, 32 nt, Human
uuuagggggcugagaugcuccaugccuuuccc

SEQ ID NO: 544607 - RNA, 28 nt, Human
uuuagggggucaauaaagcugaaauugu

SEQ ID NO: 544608 - RNA, 32 nt, Human
uuuagggguggggaagugucagcaaggugucu

SEQ ID NO: 544609 - RNA, 32 nt, Human
uuuagggguguggaggaggggaagggaggaau

SEQ ID NO: 544610 - RNA, 32 nt, Human
uuuaggguacaagaagccuguucuguccagcu

SEQ ID NO: 544611 - RNA, 21 nt, Human
uuuaggguacaugggcaacau

SEQ ID NO: 544612 - RNA, 21 nt, Human
uuuaggguuugaaaacuuguc

SEQ ID NO: 544613 - RNA, 22 nt, Human
uuuaggguuuucucuugguugu

SEQ ID NO: 544614 - RNA, 32 nt, Human
uuuagguaagagucauaucacaaaaagccauu

SEQ ID NO: 544615 - RNA, 18 nt, Human
uuuagguaggcagggccu

SEQ ID NO: 544616 - RNA, 32 nt, Human
uuuagguaguagaaucucagcacuuuguuuca

SEQ ID NO: 544617 - RNA, 32 nt, Human
uuuaggucaggagaucaagaccagcugggcca

SEQ ID NO: 544618 - RNA, 32 nt, Human
uuuagguccaauaagagcucugaagauaaaaa

SEQ ID NO: 544619 - RNA, 32 nt, Human
uuuagguccugcugccccugcugccucagccc

SEQ ID NO: 544620 - RNA, 21 nt, Human
uuuaggugauccgcccagcuu

SEQ ID NO: 544621 - RNA, 31 nt, Human
uuuaggugcaucucugggaccuccucuuucu

SEQ ID NO: 544622 - RNA, 32 nt, Human
uuuagguggaguuucacucuguugcccaggcu

SEQ ID NO: 544623 - RNA, 32 nt, Human
uuuaggugggcugugagggccaacgcuugaca

SEQ ID NO: 544624 - RNA, 32 nt, Human
uuuaggugugcaccaccaugccuggcuaauuu

SEQ ID NO: 544625 - RNA, 32 nt, Human
uuuagguucaaauuaugccaagaauuuuagau

SEQ ID NO: 544626 - RNA, 32 nt, Human
uuuagguuuccagagaagcauacauaaccuag

SEQ ID NO: 544627 - RNA, 32 nt, Human
uuuagguuucccucccuuccccaaaccauaca

SEQ ID NO: 544628 - RNA, 32 nt, Human
uuuaguaaacaguauugaucuccuggagugag

SEQ ID NO: 544629 - RNA, 32 nt, Human
uuuaguaaagggaucagccuucauggccauca

SEQ ID NO: 544630 - RNA, 32 nt, Human
uuuaguaaggagagauuagaagacaacaggca

SEQ ID NO: 544631 - RNA, 32 nt, Human
uuuaguaauccuguuugaggcugcaguguggc

SEQ ID NO: 544632 - RNA, 23 nt, Human
uuuaguaauggaaacucuuaccu

SEQ ID NO: 544633 - RNA, 32 nt, Human
uuuaguacccagacguuuuucauuugauuaag

SEQ ID NO: 544634 - RNA, 32 nt, Human
uuuaguacugucuccccuuuaccagcaaaccu

SEQ ID NO: 544635 - RNA, 32 nt, Human
uuuaguacuuacccuucucagguuccucagug

SEQ ID NO: 544636 - RNA, 32 nt, Human
uuuaguagaaacaggcuuucaccauguuggcc

SEQ ID NO: 544637 - RNA, 32 nt, Human
uuuaguagagacaggguuucuccauguugguc

SEQ ID NO: 544638 - RNA, 31 nt, Human
uuuaguagagacgggguuucacuguggucuc

SEQ ID NO: 544639 - RNA, 32 nt, Human
uuuaguagagacgggguuucacuguggucuca

SEQ ID NO: 544640 - RNA, 32 nt, Human
uuuaguagagacggguucaccauguugcccag

SEQ ID NO: 544641 - RNA, 32 nt, Human
uuuaguagagacgguguuucacuguguuagcc

SEQ ID NO: 544642 - RNA, 32 nt, Human
uuuaguagagacgguuucaccaugucggccag

SEQ ID NO: 544643 - RNA, 32 nt, Human
uuuaguagagacgguuucaccguguuagccag

SEQ ID NO: 544644 - RNA, 32 nt, Human
uuuaguagagaugguuucaccauguuggccag

SEQ ID NO: 544645 - RNA, 32 nt, Human
uuuaguagccucaguucuuccucuccuucuuu

SEQ ID NO: 544646 - RNA, 32 nt, Human
uuuaguagggaccugcucugugcucacaccuc

SEQ ID NO: 544647 - RNA, 32 nt, Human
uuuaguauauaaggagaauaugcauuauaugu

SEQ ID NO: 544648 - RNA, 32 nt, Human
uuuaguaugugauacuaauuaagauuacuuuu

SEQ ID NO: 544649 - RNA, 32 nt, Human
uuuaguauuggaaacuccuacuucccuuuuca

SEQ ID NO: 544650 - RNA, 31 nt, Human
uuuagucaccugaagaugguuggagaggccc

SEQ ID NO: 544651 - RNA, 32 nt, Human
uuuagucauucuauaggaucaugugaaaauau

SEQ ID NO: 544652 - RNA, 32 nt, Human
uuuagucccaccucuuacuuccugccucaguc

SEQ ID NO: 544653 - RNA, 32 nt, Human
uuuaguccucccugcccugcccacugccugga

SEQ ID NO: 544654 - RNA, 32 nt, Human
uuuagucuacaggugaauccagcagcuccaga

SEQ ID NO: 544655 - RNA, 23 nt, Human
uuuagucuagccugagcaauaua

SEQ ID NO: 544656 - RNA, 32 nt, Human
uuuagucugaagauggcggccucagcagcgcg

SEQ ID NO: 544657 - RNA, 24 nt, Human
uuuagucugggugacagagcaaga

SEQ ID NO: 544658 - RNA, 32 nt, Human
uuuagucugggugacagagcaagacccugucu

SEQ ID NO: 544659 - RNA, 32 nt, Human
uuuagugaggggauuggaauccccaaaaagau

SEQ ID NO: 544660 - RNA, 32 nt, Human
uuuagugaugccuccccucuuuaaauaccugu

SEQ ID NO: 544661 - RNA, 32 nt, Human
uuuagugcaaaaaguuuacaacuacagucuuu

SEQ ID NO: 544662 - RNA, 32 nt, Human
uuuagugcaaacaugcaccagcaccagaagga

SEQ ID NO: 544663 - RNA, 32 nt, Human
uuuagugcauuuccuccugccuuugcuuguuc

SEQ ID NO: 544664 - RNA, 32 nt, Human
uuuagugccagccuaggcacaacuuguccugg

SEQ ID NO: 544665 - RNA, 32 nt, Human
uuuagugcccuccugagugacugcgucaggca

SEQ ID NO: 544666 - RNA, 32 nt, Human
uuuagugccguuucuaguauauuccuguaaau

SEQ ID NO: 544667 - RNA, 32 nt, Human
uuuagugcugcaucuuauagcacuuugaaaua

SEQ ID NO: 544668 - RNA, 32 nt, Human
uuuagugcuuaucuaauuugugccucacugga

SEQ ID NO: 544669 - RNA, 32 nt, Human
uuuagugcuugcccccugcucucuccugucgu

SEQ ID NO: 544670 - RNA, 32 nt, Human
uuuagugcuugucagcauuuuuccaugaggac

SEQ ID NO: 544671 - RNA, 32 nt, Human
uuuagugcuuuuauauucauuuccuugcauuu

SEQ ID NO: 544672 - RNA, 32 nt, Human
uuuaguggaaacaaaugguugauggauccaga

SEQ ID NO: 544673 - RNA, 32 nt, Human
uuuaguggacaggguuucaccauguuggccag

SEQ ID NO: 544674 - RNA, 32 nt, Human
uuuaguggaguuggagggaagcugcgaggagg

SEQ ID NO: 544675 - RNA, 32 nt, Human
uuuaguggauggcuuucuuuuguauuuuuaug

SEQ ID NO: 544676 - RNA, 32 nt, Human
uuuaguggcgugugguucauucacaaagcugu

SEQ ID NO: 544677 - RNA, 25 nt, Human
uuuagugggcuuuggcagggcgggg

SEQ ID NO: 544678 - RNA, 32 nt, Human
uuuaguggggaacgcagagaacuuugauccau

SEQ ID NO: 544679 - RNA, 22 nt, Human
uuuagugggucacagagcggga

SEQ ID NO: 544680 - RNA, 32 nt, Human
uuuaguggucuguuuucuacuucaguauucua

SEQ ID NO: 544681 - RNA, 32 nt, Human
uuuagugguuuuauguggauaugccacaaaac

SEQ ID NO: 544682 - RNA, 32 nt, Human
uuuaguguaauuccuaccucauuugggauaaa

SEQ ID NO: 544683 - RNA, 32 nt, Human
uuuagugucaauacuaaugcucuaauaaugua

SEQ ID NO: 544684 - RNA, 32 nt, Human
uuuagugucccaaagauaucuuagauaaacua

SEQ ID NO: 544685 - RNA, 32 nt, Human
uuuaguuauuuuaguagagauaggguuucacc

SEQ ID NO: 544686 - RNA, 32 nt, Human
uuuaguucaggaguuugaaaccagccugggca

SEQ ID NO: 544687 - RNA, 32 nt, Human
uuuaguucauaccugagcuaagaaggauaauu

SEQ ID NO: 544688 - RNA, 32 nt, Human
uuuaguucauucugccuuuccuauuuguucca

SEQ ID NO: 544689 - RNA, 32 nt, Human
uuuaguucauuuucuguguugacauuugcaau

SEQ ID NO: 544690 - RNA, 32 nt, Human
uuuaguucuuucagaucuuugaaugccucuaa

SEQ ID NO: 544691 - RNA, 32 nt, Human
uuuaguugcuuagccaagcugccugagagcug

SEQ ID NO: 544692 - RNA, 32 nt, Human
uuuaguugggcagugcucccacccacccucca

SEQ ID NO: 544693 - RNA, 32 nt, Human
uuuaguuucacacauacauaguaccaugauuu

SEQ ID NO: 544694 - RNA, 32 nt, Human
uuuaguuuccaaccuucuccccaacccuugga

SEQ ID NO: 544695 - RNA, 32 nt, Human
uuuaguuugccuggagcuugaaaggagaaagc

SEQ ID NO: 544696 - RNA, 32 nt, Human
uuuaguuugguggggguggggguggggguggg

SEQ ID NO: 544697 - RNA, 32 nt, Human
uuuaguuuguuaaugucugaaaugaauaaaaa

SEQ ID NO: 544698 - RNA, 32 nt, Human
uuuaguuuuaacaacaguaaauugucuaccaa

SEQ ID NO: 544699 - RNA, 32 nt, Human
uuuaguuuuaggacacauuuaugcagaugagc

SEQ ID NO: 544700 - RNA, 32 nt, Human
uuuaguuuugagacauggucucauucugucac

SEQ ID NO: 544701 - RNA, 32 nt, Human
uuuaguuuugcacuugguuuucuauaaaguac

SEQ ID NO: 544702 - RNA, 32 nt, Human
uuuaguuuuucccauucgcuugcccuggccuc

SEQ ID NO: 544703 - RNA, 32 nt, Human
uuuauaaaaaggaaaagaaauauacaaacuuu

SEQ ID NO: 544704 - RNA, 32 nt, Human
uuuauaaaaggcagaaauagcacuccauuaac

SEQ ID NO: 544705 - RNA, 32 nt, Human
uuuauaaacaacagaaauuuguuucucacagu

SEQ ID NO: 544706 - RNA, 32 nt, Human
uuuauaaacucaaauuggcaccuacugaauua

SEQ ID NO: 544707 - RNA, 32 nt, Human
uuuauaaacucucugcugcugagcuuggggcc

SEQ ID NO: 544708 - RNA, 32 nt, Human
uuuauaaacugaagccaacugugaauaaacug

SEQ ID NO: 544709 - RNA, 32 nt, Human
uuuauaaagaaaaauagguucaauggacccac

SEQ ID NO: 544710 - RNA, 32 nt, Human
uuuauaaagacaggguuuuuccauguugccca

SEQ ID NO: 544711 - RNA, 32 nt, Human
uuuauaaauacagugugucuucuuuuauucac

SEQ ID NO: 544712 - RNA, 32 nt, Human
uuuauaaauauauaaauacauguauguauguc

SEQ ID NO: 544713 - RNA, 32 nt, Human
uuuauaaauauguauaauuaugauguaaaaua

SEQ ID NO: 544714 - RNA, 32 nt, Human
uuuauaaaugcuauaaagaaauauuguguuuc

SEQ ID NO: 544715 - RNA, 32 nt, Human
uuuauaaaugucauuugcaaccaaaugaagua

SEQ ID NO: 544716 - RNA, 32 nt, Human
uuuauaaauguugcuuucugauuuuuaucaga

SEQ ID NO: 544717 - RNA, 32 nt, Human
uuuauaacacaaaacacaacuuacagaaguug

SEQ ID NO: 544718 - RNA, 32 nt, Human
uuuauaacagcaguauuuauccugguuuaauu

SEQ ID NO: 544719 - RNA, 32 nt, Human
uuuauaaccagaugguuccuuucacaacccug

SEQ ID NO: 544720 - RNA, 32 nt, Human
uuuauaaccccagccugaccugagacugucgc

SEQ ID NO: 544721 - RNA, 32 nt, Human
uuuauaacugacuuuuggauucccaagucauu

SEQ ID NO: 544722 - RNA, 32 nt, Human
uuuauaacuguacuucuggugacuguacaguu

SEQ ID NO: 544723 - RNA, 32 nt, Human
uuuauaagaagaggaagagacaucaguaaugc

SEQ ID NO: 544724 - RNA, 32 nt, Human
uuuauaagauguaauuauuugagaaacaagug

SEQ ID NO: 544725 - RNA, 32 nt, Human
uuuauaagcacauuguccccucauguuuccua

SEQ ID NO: 544726 - RNA, 30 nt, Human
uuuauaagcuugcaaguaacagacaagaug

SEQ ID NO: 544727 - RNA, 32 nt, Human
uuuauaaggagagacaccagagagaugaucuc

SEQ ID NO: 544728 - RNA, 32 nt, Human
uuuauaagugaucaguuaaugccuaagaguga

SEQ ID NO: 544729 - RNA, 32 nt, Human
uuuauaauauagaaguauagcuuuauaaagau

SEQ ID NO: 544730 - RNA, 32 nt, Human
uuuauaaucuauaugcaauuucaugccauuca

SEQ ID NO: 544731 - RNA, 32 nt, Human
uuuauaaugauuauaauuuacaugcuuauuuu

SEQ ID NO: 544732 - RNA, 32 nt, Human
uuuauaauuauuuucuugacuuuuggcuauaa

SEQ ID NO: 544733 - RNA, 32 nt, Human
uuuauaauucauaaccauagccucgaucauca

SEQ ID NO: 544734 - RNA, 32 nt, Human
uuuauaauugacacacucucucccucuccacu

SEQ ID NO: 544735 - RNA, 32 nt, Human
uuuauaauuggccuggugugguggcccacgcc

SEQ ID NO: 544736 - RNA, 32 nt, Human
uuuauaauugugucuaaagaaaauuaugaacu

SEQ ID NO: 544737 - RNA, 32 nt, Human
uuuauacaaagcccuccagccuguuugugggg

SEQ ID NO: 544738 - RNA, 32 nt, Human
uuuauacaaaggagggccgcugaaggacaaac

SEQ ID NO: 544739 - RNA, 19 nt, Human
uuuauacaacgcugucaua

SEQ ID NO: 544740 - RNA, 21 nt, Human
uuuauacaacuuauuuacuca

SEQ ID NO: 544741 - RNA, 32 nt, Human
uuuauacagaaaucuugugaaaccacugccca

SEQ ID NO: 544742 - RNA, 32 nt, Human
uuuauacaguauaucagcugagucaugauauu

SEQ ID NO: 544743 - RNA, 32 nt, Human
uuuauacaguuuuccuuuccuucaccuuugua

SEQ ID NO: 544744 - RNA, 32 nt, Human
uuuauacaucucuucagggaagagagaaccaa

SEQ ID NO: 544745 - RNA, 32 nt, Human
uuuauacaucuuagggagacacaagaucagua

SEQ ID NO: 544746 - RNA, 32 nt, Human
uuuauacaugagaaacagccuucaacaaguau

SEQ ID NO: 544747 - RNA, 32 nt, Human
uuuauaccaccuugacccauuugcuacauucc

SEQ ID NO: 544748 - RNA, 32 nt, Human
uuuauaccauggcaaggccuuuucuuucacaa

SEQ ID NO: 544749 - RNA, 32 nt, Human
uuuauacccacacagcaacugguccacugcuu

SEQ ID NO: 544750 - RNA, 32 nt, Human
uuuauacccucuggcagagcaaaggaacaagg

SEQ ID NO: 544751 - RNA, 32 nt, Human
uuuauacccuugcuguuguucagucuaaucau

SEQ ID NO: 544752 - RNA, 32 nt, Human
uuuauaccuucuaggagcuccuauugggagac

SEQ ID NO: 544753 - RNA, 32 nt, Human
uuuauacgcuuucccacucaugacaugccugc

SEQ ID NO: 544754 - RNA, 32 nt, Human
uuuauacguaaucacuccugccccaacacaca

SEQ ID NO: 544755 - RNA, 32 nt, Human
uuuauacguaggguuguguccauuuccucgug

SEQ ID NO: 544756 - RNA, 32 nt, Human
uuuauacuauagccacaauucugucaaagaua

SEQ ID NO: 544757 - RNA, 32 nt, Human
uuuauacucccuccuccggccuuuccuuguac

SEQ ID NO: 544758 - RNA, 23 nt, Human
uuuauacuggagagaaacucuac

SEQ ID NO: 544759 - RNA, 32 nt, Human
uuuauacuguauuucaaagaaguuguuugagg

SEQ ID NO: 544760 - RNA, 32 nt, Human
uuuauacuguuuuguucacuguauuuaguaga

SEQ ID NO: 544761 - RNA, 32 nt, Human
uuuauacuuaacaucagaucuuuucuauaaua

SEQ ID NO: 544762 - RNA, 32 nt, Human
uuuauacuuaacugagacauuuugucaaggcu

SEQ ID NO: 544763 - RNA, 32 nt, Human
uuuauagaaagcccagugacaugggccagcag

SEQ ID NO: 544764 - RNA, 32 nt, Human
uuuauagaaagcuucaauagaacuguuucaac

SEQ ID NO: 544765 - RNA, 32 nt, Human
uuuauagaaaugcagaaguuugggcucugcuc

SEQ ID NO: 544766 - RNA, 32 nt, Human
uuuauagagacaggagucucacauuguucccc

SEQ ID NO: 544767 - RNA, 32 nt, Human
uuuauagagacagggucgcacuauguugcccg

SEQ ID NO: 544768 - RNA, 32 nt, Human
uuuauagagacagggucucccucagucgcuca

SEQ ID NO: 544769 - RNA, 32 nt, Human
uuuauagagacagggucuugcuguguuaccca

SEQ ID NO: 544770 - RNA, 32 nt, Human
uuuauagagacaggguuucaccguguuggcca

SEQ ID NO: 544771 - RNA, 32 nt, Human
uuuauagagacaggguuucgccauguugcaca

SEQ ID NO: 544772 - RNA, 32 nt, Human
uuuauagauaaagaugguaagguaggauaagu

SEQ ID NO: 544773 - RNA, 32 nt, Human
uuuauagcaaaacuguuaagcugcucgagucu

SEQ ID NO: 544774 - RNA, 32 nt, Human
uuuauagccaucauguuucuaagagacuugga

SEQ ID NO: 544775 - RNA, 32 nt, Human
uuuauagcccuaggggugguaugacccaaagg

SEQ ID NO: 544776 - RNA, 32 nt, Human
uuuauagccuacauuuuaauuucuugauaucu

SEQ ID NO: 544777 - RNA, 32 nt, Human
uuuauagcucacugcaaaucuaacuucaucau

SEQ ID NO: 544778 - RNA, 32 nt, Human
uuuauagcuguuccuccaaguaucaauuuuuc

SEQ ID NO: 544779 - RNA, 32 nt, Human
uuuauaggaaggcagggcaaacuuguaggagu

SEQ ID NO: 544780 - RNA, 32 nt, Human
uuuauaggauguggucccacaggccugucaca

SEQ ID NO: 544781 - RNA, 32 nt, Human
uuuauaggccuuucauccuggugcugacggau

SEQ ID NO: 544782 - RNA, 32 nt, Human
uuuauagggugagguaagagacagccucccaa

SEQ ID NO: 544783 - RNA, 32 nt, Human
uuuauaguauaugugaaauccuagaaaaguau

SEQ ID NO: 544784 - RNA, 32 nt, Human
uuuauagucacagauggcagaggaagaggcuc

SEQ ID NO: 544785 - RNA, 21 nt, Human
uuuauaguccaaagaaaccaa

SEQ ID NO: 544786 - RNA, 32 nt, Human
uuuauaguccaguguuuguuuucauugaagaa

SEQ ID NO: 544787 - RNA, 32 nt, Human
uuuauaguccuggccagacccugcugcucacu

SEQ ID NO: 544788 - RNA, 32 nt, Human
uuuauagucucagcuacuagggaggcugaggc

SEQ ID NO: 544789 - RNA, 23 nt, Human
uuuauagugucuuucacguguuu

SEQ ID NO: 544790 - RNA, 32 nt, Human
uuuauaguguuagaaaaccagccacauuacag

SEQ ID NO: 544791 - RNA, 32 nt, Human
uuuauaguuggcuguggggacuucugauuucu

SEQ ID NO: 544792 - RNA, 32 nt, Human
uuuauaguuguguuguauuacuuguuuaauaa

SEQ ID NO: 544793 - RNA, 32 nt, Human
uuuauaguuuuaagaggaagaaaacagaaacg

SEQ ID NO: 544794 - RNA, 32 nt, Human
uuuauauaaacauccacuucucuuucaaaaga

SEQ ID NO: 544795 - RNA, 32 nt, Human
uuuauauaaauagagaaauggaguuagccaua

SEQ ID NO: 544796 - RNA, 32 nt, Human
uuuauauaauuguucuccguucguugauauca

SEQ ID NO: 544797 - RNA, 32 nt, Human
uuuauauacaagugauaauacagauuuguaac

SEQ ID NO: 544798 - RNA, 32 nt, Human
uuuauauagaggacaaaacagcauuaaacuca

SEQ ID NO: 544799 - RNA, 32 nt, Human
uuuauaucagcaucuuggcuaucagcuggagc

SEQ ID NO: 544800 - RNA, 32 nt, Human
uuuauaucagguaacugaggcacacaaaggga

SEQ ID NO: 544801 - RNA, 32 nt, Human
uuuauaucaugggugaaagugaucauaacauu

SEQ ID NO: 544802 - RNA, 32 nt, Human
uuuauauccaaguucagacucaaaggcauuau

SEQ ID NO: 544803 - RNA, 32 nt, Human
uuuauauccacacauaaagaccagccugauua

SEQ ID NO: 544804 - RNA, 32 nt, Human
uuuauaucucugcccaggucucggugccugca

SEQ ID NO: 544805 - RNA, 32 nt, Human
uuuauaugaacucuguuucuuuccucgaaggc

SEQ ID NO: 544806 - RNA, 32 nt, Human
uuuauaugcagguuuuuguuguaccuguaucc

SEQ ID NO: 544807 - RNA, 32 nt, Human
uuuauaugcauauauuuuagggcugcuagacu

SEQ ID NO: 544808 - RNA, 32 nt, Human
uuuauaugccgcugcuuugaaagagaaccuag

SEQ ID NO: 544809 - RNA, 32 nt, Human
uuuauaugggcaacuuuaugcgaaauccaaau

SEQ ID NO: 544810 - RNA, 32 nt, Human
uuuauauguccuuccaaaaauguuguugugua

SEQ ID NO: 544811 - RNA, 32 nt, Human
uuuauauguguauguauuuuguaucaaggaca

SEQ ID NO: 544812 - RNA, 32 nt, Human
uuuauauguguaugugugugacaggaaaaucu

SEQ ID NO: 544813 - RNA, 32 nt, Human
uuuauauguguguguauguguacacacaugua

SEQ ID NO: 544814 - RNA, 30 nt, Human
uuuauauguuacuggcaguuggaaaugcag

SEQ ID NO: 544815 - RNA, 32 nt, Human
uuuauauuaaaaugaaguaugugcuuaaaguc

SEQ ID NO: 544816 - RNA, 24 nt, Human
uuuauauuacauaaagucuuuaua

SEQ ID NO: 544817 - RNA, 32 nt, Human
uuuauauuacugaacaaccaaaucuacccucc

SEQ ID NO: 544818 - RNA, 32 nt, Human
uuuauauuaucaaaugagagcuacucuguuac

SEQ ID NO: 544819 - RNA, 32 nt, Human
uuuauauucauguuuguggaaaaaucuugcaa

SEQ ID NO: 544820 - RNA, 32 nt, Human
uuuauauugaaagaaauaggccagcagagacu

SEQ ID NO: 544821 - RNA, 32 nt, Human
uuuauauugagacauauaauguguaaacuuag

SEQ ID NO: 544822 - RNA, 32 nt, Human
uuuauauuuccaucuucagcccuuaacccagg

SEQ ID NO: 544823 - RNA, 32 nt, Human
uuuauauuugcagccacugucagaugggcauc

SEQ ID NO: 544824 - RNA, 32 nt, Human
uuuauauuuggggcaucucuauagaaagugac

SEQ ID NO: 544825 - RNA, 32 nt, Human
uuuauauuuucgcucugucucccagguuggag

SEQ ID NO: 544826 - RNA, 32 nt, Human
uuuauauuuucugugcaucacacacaugcuuu

SEQ ID NO: 544827 - RNA, 32 nt, Human
uuuauauuuuuaguagagauggaguuucacca

SEQ ID NO: 544828 - RNA, 32 nt, Human
uuuaucaaaacaagaugaaacacagaaaaguu

SEQ ID NO: 544829 - RNA, 32 nt, Human
uuuaucaaccuucaguguccaagcagaagacc

SEQ ID NO: 544830 - RNA, 32 nt, Human
uuuaucaagggccuacuuuauggcagacauug

SEQ ID NO: 544831 - RNA, 32 nt, Human
uuuaucaaguaguucaguauugucauuuguuu

SEQ ID NO: 544832 - RNA, 32 nt, Human
uuuaucaauacugaucagacuuuaaagaaauu

SEQ ID NO: 544833 - RNA, 32 nt, Human
uuuaucacaacaaaggccuaguuuguuccaug

SEQ ID NO: 544834 - RNA, 32 nt, Human
uuuaucacaugcuggcacuaaaaggcagaagg

SEQ ID NO: 544835 - RNA, 32 nt, Human
uuuaucaccuguucagaugagaagauuuuugu

SEQ ID NO: 544836 - RNA, 32 nt, Human
uuuaucaccuuucccauuucuuuccccacaag

SEQ ID NO: 544837 - RNA, 32 nt, Human
uuuaucaccuuuccucacauagguaccuuuuu

SEQ ID NO: 544838 - RNA, 32 nt, Human
uuuaucacgguaaacuucauucauagauccuc

SEQ ID NO: 544839 - RNA, 32 nt, Human
uuuaucacuacaagcuuuuaacuuuuuaaguu

SEQ ID NO: 544840 - RNA, 32 nt, Human
uuuaucagcaccugaggcaggagaagagauga

SEQ ID NO: 544841 - RNA, 32 nt, Human
uuuaucaggaugaccauugccauuugucaggu

SEQ ID NO: 544842 - RNA, 32 nt, Human
uuuaucaggcagccagagccugggagguggua

SEQ ID NO: 544843 - RNA, 32 nt, Human
uuuaucagguguaaacaaaaagcugaacaguu

SEQ ID NO: 544844 - RNA, 32 nt, Human
uuuaucagugccugggaaugcucaaggcccag

SEQ ID NO: 544845 - RNA, 31 nt, Human
uuuaucauaaauuuuuagcauuuaaaaauuc

SEQ ID NO: 544846 - RNA, 32 nt, Human
uuuaucauccuuuccccuuucccuucaacucu

SEQ ID NO: 544847 - RNA, 32 nt, Human
uuuaucaucgcuccaacuuucacuaaaaagga

SEQ ID NO: 544848 - RNA, 32 nt, Human
uuuaucaucugucaauccaucuuccuacuauc

SEQ ID NO: 544849 - RNA, 32 nt, Human
uuuaucaugaaugacuucuccauugugauucu

SEQ ID NO: 544850 - RNA, 32 nt, Human
uuuauccaaacaucuuccaauuuauuuuguuu

SEQ ID NO: 544851 - RNA, 32 nt, Human
uuuauccaaagcuuuuucucuguguccacucu

SEQ ID NO: 544852 - RNA, 32 nt, Human
uuuauccaacccauuuaaaccaaaaauaaaac

SEQ ID NO: 544853 - RNA, 32 nt, Human
uuuauccaccuacucaggccaguuucaugcag

SEQ ID NO: 544854 - RNA, 32 nt, Human
uuuauccagccugcuucuccagccuucuaggc

SEQ ID NO: 544855 - RNA, 32 nt, Human
uuuauccagucuaucauagaugggcauuuggg

SEQ ID NO: 544856 - RNA, 32 nt, Human
uuuauccauauugucucaaaugaccagauuuc

SEQ ID NO: 544857 - RNA, 32 nt, Human
uuuaucccagcacccugggggaugccagccuu

SEQ ID NO: 544858 - RNA, 32 nt, Human
uuuaucccagcagcagcgucuccuucaugagu

SEQ ID NO: 544859 - RNA, 32 nt, Human
uuuaucccaugagcaagaaccacuuuauagcu

SEQ ID NO: 544860 - RNA, 32 nt, Human
uuuaucccuuucucuucugacugguauaccua

SEQ ID NO: 544861 - RNA, 32 nt, Human
uuuauccgggugggaagagggagucacaucgc

SEQ ID NO: 544862 - RNA, 32 nt, Human
uuuauccugaacagccacagugccugaauuca

SEQ ID NO: 544863 - RNA, 32 nt, Human
uuuauccugaguacugggauuacaggcgccca

SEQ ID NO: 544864 - RNA, 32 nt, Human
uuuauccugauagccacugacccacucaagaa

SEQ ID NO: 544865 - RNA, 32 nt, Human
uuuauccugcagacccugcugcucugaaagaa

SEQ ID NO: 544866 - RNA, 32 nt, Human
uuuauccugcauugaaaaugcauuacuuuugc

SEQ ID NO: 544867 - RNA, 32 nt, Human
uuuauccugcuaacuuucauuuucuuauagca

SEQ ID NO: 544868 - RNA, 32 nt, Human
uuuauccuuccaccaucucucucagaggaaug

SEQ ID NO: 544869 - RNA, 32 nt, Human
uuuauccuuccaucuuuuccuuggcauuuacc

SEQ ID NO: 544870 - RNA, 32 nt, Human
uuuauccuugaauuugagggugaugggguggg

SEQ ID NO: 544871 - RNA, 32 nt, Human
uuuauccuuuguaucugaaauaccuuuaauuu

SEQ ID NO: 544872 - RNA, 32 nt, Human
uuuaucgccagagucccugaacucucgcuuuc

SEQ ID NO: 544873 - RNA, 32 nt, Human
uuuaucggcauuguccaaaauauuuuauucuu

SEQ ID NO: 544874 - RNA, 32 nt, Human
uuuaucgguggacccaacaaucuucuguagac

SEQ ID NO: 544875 - RNA, 23 nt, Human
uuuaucgucucgguuuuagccaa

SEQ ID NO: 544876 - RNA, 32 nt, Human
uuuaucuaaaccauugcuuaaugaguguguuu

SEQ ID NO: 544877 - RNA, 32 nt, Human
uuuaucuaccaagagcgcagacuugcauccug

SEQ ID NO: 544878 - RNA, 32 nt, Human
uuuaucuauuugcacguucccuagagaaacag

SEQ ID NO: 544879 - RNA, 32 nt, Human
uuuaucucccuuuaaaacccuaccuauccuga

SEQ ID NO: 544880 - RNA, 32 nt, Human
uuuaucucuccuuucauccuuuuuaucuuucu

SEQ ID NO: 544881 - RNA, 32 nt, Human
uuuaucucuugauguaaccaucuucuuucucc

SEQ ID NO: 544882 - RNA, 32 nt, Human
uuuaucugagaaggaaggaaggucagaaagug

SEQ ID NO: 544883 - RNA, 32 nt, Human
uuuaucugagcccacagguggaaaggggaacu

SEQ ID NO: 544884 - RNA, 32 nt, Human
uuuaucugcaccuuauagacugaugucucuuu

SEQ ID NO: 544885 - RNA, 32 nt, Human
uuuaucugcagauggccuaauacuuaguuguc

SEQ ID NO: 544886 - RNA, 32 nt, Human
uuuaucugcaucagccagguugcugaguucaa

SEQ ID NO: 544887 - RNA, 32 nt, Human
uuuaucuggacaucccaccaucaaagaucuug

SEQ ID NO: 544888 - RNA, 32 nt, Human
uuuaucuggcauuucuggcucucuaguuggcu

SEQ ID NO: 544889 - RNA, 32 nt, Human
uuuaucuggccucugcuaugagucacagcuga

SEQ ID NO: 544890 - RNA, 32 nt, Human
uuuaucuguauacauuucaccaauuuauuaac

SEQ ID NO: 544891 - RNA, 32 nt, Human
uuuaucuguggaaaauuuaaugcugaauuaca

SEQ ID NO: 544892 - RNA, 32 nt, Human
uuuaucuguuguccccuuccucuccucugccc

SEQ ID NO: 544893 - RNA, 32 nt, Human
uuuaucuuaaaagagcuugcucugucuaccuu

SEQ ID NO: 544894 - RNA, 32 nt, Human
uuuaucuuacuuuuggauaauauccacugcaa

SEQ ID NO: 544895 - RNA, 32 nt, Human
uuuaucuuauaagaggaaaacaugacaaucau

SEQ ID NO: 544896 - RNA, 32 nt, Human
uuuaucuuauuuucucaaucuccucucucuuu

SEQ ID NO: 544897 - RNA, 32 nt, Human
uuuaucuucacaagucuguaaucccagcacuu

SEQ ID NO: 544898 - RNA, 32 nt, Human
uuuaucuucccugagugccugggucucccucc

SEQ ID NO: 544899 - RNA, 32 nt, Human
uuuaucuuccuguguucucuggcuucagaguu

SEQ ID NO: 544900 - RNA, 32 nt, Human
uuuaucuuccuuauaaaucacacaccuuuucu

SEQ ID NO: 544901 - RNA, 32 nt, Human
uuuaucuucuccaucugugccucucuccuccc

SEQ ID NO: 544902 - RNA, 32 nt, Human
uuuaucuucugcucuuucuucuuccacacaug

SEQ ID NO: 544903 - RNA, 32 nt, Human
uuuaucuucuggaugccaaugugaauuguggu

SEQ ID NO: 544904 - RNA, 26 nt, Human
uuucuuggaugggaccuaucggguca

SEQ ID NO: 544905 - RNA, 31 nt, Human
uuucuuggcaaaguuucugguauggucaagc

SEQ ID NO: 544906 - RNA, 20 nt, Human
uuucuuggcaccuucagguc

SEQ ID NO: 544907 - RNA, 32 nt, Human
uuucuuggcaugcaucuuuaauuccuuauccu

SEQ ID NO: 544908 - RNA, 32 nt, Human
uuucuuggccccugucucucuccauguugggg

SEQ ID NO: 544909 - RNA, 32 nt, Human
uuucuuggccuguccucugcauggcccagugu

SEQ ID NO: 544910 - RNA, 32 nt, Human
uuucuuggccuucucuucucuggacuagguga

SEQ ID NO: 544911 - RNA, 32 nt, Human
uuucuuggcuuccuccuuacucccaucuggac

SEQ ID NO: 544912 - RNA, 32 nt, Human
uuucuugggaaaacauacuuuucauaucucuu

SEQ ID NO: 544913 - RNA, 32 nt, Human
uuucuugggaagucauugcuguucaucacuuu

SEQ ID NO: 544914 - RNA, 32 nt, Human
uuucuugggaggcugaggcgggaguaucauuu

SEQ ID NO: 544915 - RNA, 32 nt, Human
uuucuuggggccugaaccccagugguccaaag

SEQ ID NO: 544916 - RNA, 32 nt, Human
uuucuuggguguugagaacuuguaccauggac

SEQ ID NO: 544917 - RNA, 32 nt, Human
uuucuugguguuuguugucuccagguguaagc

SEQ ID NO: 544918 - RNA, 32 nt, Human
uuucuuguacaacugguacacacuaauaaaca

SEQ ID NO: 544919 - RNA, 32 nt, Human
uuucuugugcaucuguccaccuguuccccagu

SEQ ID NO: 544920 - RNA, 32 nt, Human
uuucuugugguguccggaucagcauccugcau

SEQ ID NO: 544921 - RNA, 32 nt, Human
uuucuugugugugccaucuuuccauuguuggc

SEQ ID NO: 544922 - RNA, 32 nt, Human
uuucuuguguuuuaagaauuaggagacaugga

SEQ ID NO: 544923 - RNA, 32 nt, Human
uuucuuguuguucaaaugauuuuaauuauugg

SEQ ID NO: 544924 - RNA, 32 nt, Human
uuucuuguuuuauucccuugaugaccuaggga

SEQ ID NO: 544925 - RNA, 32 nt, Human
uuucuuguuuuuagaauuauuccuggacuauu

SEQ ID NO: 544926 - RNA, 32 nt, Human
uuucuuuaaucaauguguucucuucggugaua

SEQ ID NO: 544927 - RNA, 32 nt, Human
uuucuuuaauguagccaauuuaggcaggguaa

SEQ ID NO: 544928 - RNA, 24 nt, Human
uuucuuuagagagcagaagcagaa

SEQ ID NO: 544929 - RNA, 32 nt, Human
uuucuuuagggcccuggacucaaaagagcauc

SEQ ID NO: 544930 - RNA, 32 nt, Human
uuucuuuauaauucacacauauaugcagagaa

SEQ ID NO: 544931 - RNA, 32 nt, Human
uuucuuuauagucugaacuguuuaauaaauug

SEQ ID NO: 544932 - RNA, 23 nt, Human
uuucuuuauauccaguuuuuaca

SEQ ID NO: 544933 - RNA, 32 nt, Human
uuucuuuaucaauuaaauagcucagagaguac

SEQ ID NO: 544934 - RNA, 32 nt, Human
uuucuuuaugaucuuaacuucacuuccauuag

SEQ ID NO: 544935 - RNA, 32 nt, Human
uuucuuuauggcaaagccaaaauagcuccuac

SEQ ID NO: 544936 - RNA, 22 nt, Human
uuucuuuauguacaagauggaa

SEQ ID NO: 544937 - RNA, 32 nt, Human
uuucuuuauguagaaaauggguuccugcagca

SEQ ID NO: 544938 - RNA, 32 nt, Human
uuucuuuauuuauaacaugaagcacaauggau

SEQ ID NO: 544939 - RNA, 32 nt, Human
uuucuuucacuacuuauccugccuuuuugcau

SEQ ID NO: 544940 - RNA, 32 nt, Human
uuucuuucacuccuuccuuuccuuccuuucuc

SEQ ID NO: 544941 - RNA, 32 nt, Human
uuucuuucagcagccugagucagaggcgggcu

SEQ ID NO: 544942 - RNA, 32 nt, Human
uuucuuucagccacaguguguaacacucagca

SEQ ID NO: 544943 - RNA, 32 nt, Human
uuucuuucagcuguuuguuaguuuuugcuuua

SEQ ID NO: 544944 - RNA, 32 nt, Human
uuucuuucaguguggcugcuuuggcuugguga

SEQ ID NO: 544945 - RNA, 32 nt, Human
uuucuuucaguuaaaccuguguccacauguuu

SEQ ID NO: 544946 - RNA, 32 nt, Human
uuucuuucaucugccuuucauccugcaaaaag

SEQ ID NO: 544947 - RNA, 32 nt, Human
uuucuuucauucuugcugguuuauaccuaugu

SEQ ID NO: 544948 - RNA, 32 nt, Human
uuucuuucauuucacagucuaauucucccaga

SEQ ID NO: 544949 - RNA, 32 nt, Human
uuucuuucauuuccucggauucuuucaccacu

SEQ ID NO: 544950 - RNA, 32 nt, Human
uuucuuucccccaaaugucugugcagugucag

SEQ ID NO: 544951 - RNA, 32 nt, Human
uuucuuucccccauucucccugcauccuuguc

SEQ ID NO: 544952 - RNA, 32 nt, Human
uuucuuuccccucaucuuucaccaggaacugg

SEQ ID NO: 544953 - RNA, 32 nt, Human
uuucuuucccucuccguuuuggugggcugguu

SEQ ID NO: 544954 - RNA, 32 nt, Human
uuucuuucccuuaagaaucaaaagcagaaaac

SEQ ID NO: 544955 - RNA, 32 nt, Human
uuucuuucccuuucucuuucuaucucucuuua

SEQ ID NO: 544956 - RNA, 32 nt, Human
uuucuuuccuucccucuccagagauguugguu

SEQ ID NO: 544957 - RNA, 32 nt, Human
uuucuuuccuuuccccuucccuucccuucccu

SEQ ID NO: 544958 - RNA, 32 nt, Human
uuucuuuccuuuucucuucuuuauuuucuuuu

SEQ ID NO: 544959 - RNA, 32 nt, Human
uuucuuucuaacuccuaccuuucccuugcaga

SEQ ID NO: 544960 - RNA, 32 nt, Human
uuucuuucuauaacguccuccuuguccuccuu

SEQ ID NO: 544961 - RNA, 32 nt, Human
uuucuuucucacuguaaauacacauucuuauu

SEQ ID NO: 544962 - RNA, 32 nt, Human
uuucuuucuccaggaggguggugauagaaaca

SEQ ID NO: 544963 - RNA, 32 nt, Human
uuucuuucuccuccaugugucuuggcaggcac

SEQ ID NO: 544964 - RNA, 32 nt, Human
uuucuuucuccuccuccaaccuuggcggaggc

SEQ ID NO: 544965 - RNA, 32 nt, Human
uuucuuucuuacagaaguucugauauugaauu

SEQ ID NO: 544966 - RNA, 32 nt, Human
uuucuuucuuccuauggucuugucugaauaaa

SEQ ID NO: 544967 - RNA, 32 nt, Human
uuucuuucuuucagccugaauucuaagcaaca

SEQ ID NO: 544968 - RNA, 32 nt, Human
uuucuuucuuucuccuuccuuccuuccucuuu

SEQ ID NO: 544969 - RNA, 32 nt, Human
uuucuuucuuugacuccucuucugccugccuu

SEQ ID NO: 544970 - RNA, 32 nt, Human
uuucuuugagaaagaaguggacuggggcacaa

SEQ ID NO: 544971 - RNA, 23 nt, Human
uuucuuugauauacaguuuuuuc

SEQ ID NO: 544972 - RNA, 32 nt, Human
uuucuuugaucuggacagaacauuuauaucag

SEQ ID NO: 544973 - RNA, 32 nt, Human
uuucuuugccaucucugcuccaaccgggaugg

SEQ ID NO: 544974 - RNA, 31 nt, Human
uuucuuugccucucuaugucucucugucuuu

SEQ ID NO: 544975 - RNA, 23 nt, Human
uuucuuuggaaaccaggauggaa

SEQ ID NO: 544976 - RNA, 23 nt, Human
uuucuuugguuuuguuuucuuca

SEQ ID NO: 544977 - RNA, 32 nt, Human
uuucuuuguaaauacuaugcguucuggugugu

SEQ ID NO: 544978 - RNA, 32 nt, Human
uuucuuuguaaauacuauguguucuggugugu

SEQ ID NO: 544979 - RNA, 19 nt, Human
uuucuuuguauucuaaaaa

SEQ ID NO: 544980 - RNA, 32 nt, Human
uuucuuugucuuucuuucuuuuccuuccuccc

SEQ ID NO: 544981 - RNA, 26 nt, Human
uuucuuuguguucucucauuuuuuca

SEQ ID NO: 544982 - RNA, 32 nt, Human
uuucuuuguucccagccaugcuuuuguaacuu

SEQ ID NO: 544983 - RNA, 32 nt, Human
uuucuuuguugacugaaaaagcgagaaaggug

SEQ ID NO: 544984 - RNA, 32 nt, Human
uuucuuuuacuuaccugcuugaauacuugaau

SEQ ID NO: 544985 - RNA, 32 nt, Human
uuucuuuuaucaguccguugggcacagcaggu

SEQ ID NO: 544986 - RNA, 32 nt, Human
uuucuuuuauucaccuucccuugaccaagaaa

SEQ ID NO: 544987 - RNA, 32 nt, Human
uuucuuuucaguuuguguuauuuggaagacag

SEQ ID NO: 544988 - RNA, 32 nt, Human
uuucuuuucauaaagauacauaccuggauuug

SEQ ID NO: 544989 - RNA, 32 nt, Human
uuucuuuucauugccuccuuuuccaggcagcu

SEQ ID NO: 544990 - RNA, 32 nt, Human
uuucuuuuccuuccucccuuccuuccuuccuu

SEQ ID NO: 544991 - RNA, 32 nt, Human
uuucuuuucuacugcaucaucaggcugcagau

SEQ ID NO: 544992 - RNA, 32 nt, Human
uuucuuuucuaucacauuuucagucuguaaau

SEQ ID NO: 544993 - RNA, 32 nt, Human
uuucuuuucuauuccaucaucugcccuuuuau

SEQ ID NO: 544994 - RNA, 32 nt, Human
uuucuuuucucaucuuaaaacccuuuauguuc

SEQ ID NO: 544995 - RNA, 32 nt, Human
uuucuuuucucuauccucuuucccagcuuuau

SEQ ID NO: 544996 - RNA, 32 nt, Human
uuucuuuucuggacucuaauaggcccaauuaa

SEQ ID NO: 544997 - RNA, 32 nt, Human
uuucuuuucuggcacuuuaauggcuugaggua

SEQ ID NO: 544998 - RNA, 32 nt, Human
uuucuuuucuucuccucugggauggguagucu

SEQ ID NO: 544999 - RNA, 32 nt, Human
uuucuuuucuugguggugcaaagugguauaac

SEQ ID NO: 545000 - RNA, 32 nt, Human
uuucuuuucuuugcccuccugauucuuggcug

SEQ ID NO: 545001 - RNA, 32 nt, Human
uuucuuuucuuuucuuucuuccuuccuuuuuc

SEQ ID NO: 545002 - RNA, 32 nt, Human
uuucuuuucuuuuucaagauggagucucaaua

SEQ ID NO: 545003 - RNA, 32 nt, Human
uuucuuuugaaggaauaaauguucuuuauaca

SEQ ID NO: 545004 - RNA, 32 nt, Human
uuucuuuugagacccuuugcuccaguccuaug

SEQ ID NO: 545005 - RNA, 32 nt, Human
uuucuuuugcauguugccuagcauuuuauaga

SEQ ID NO: 545006 - RNA, 18 nt, Human
uuucuuuugcucugcuuu

SEQ ID NO: 545007 - RNA, 32 nt, Human
uuucuuuugcuucuggcuucugagaguuuccu

SEQ ID NO: 545008 - RNA, 32 nt, Human
uuucuuuuggcuuaaagugaaaaagaagaaau

SEQ ID NO: 545009 - RNA, 32 nt, Human
uuucuuuugggaagagggagaaaaugaaauaa

SEQ ID NO: 545010 - RNA, 32 nt, Human
uuucuuuuguuagaggagagcuugaugugauu

SEQ ID NO: 545011 - RNA, 32 nt, Human
uuucuuuuuaaaaauuuuccaaaacuuuucuc

SEQ ID NO: 545012 - RNA, 25 nt, Human
uuucuuuuuaguucucuagggucug

SEQ ID NO: 545013 - RNA, 32 nt, Human
uuucuuuuuccaccugagacuuguuuauaaaa

SEQ ID NO: 545014 - RNA, 32 nt, Human
uuucuuuuucccucacuccaucauccugacag

SEQ ID NO: 545015 - RNA, 32 nt, Human
uuucuuuuuccuccucugccccagguccaugc

SEQ ID NO: 545016 - RNA, 32 nt, Human
uuucuuuuucucccauccuuuuuccuucccaa

SEQ ID NO: 545017 - RNA, 32 nt, Human
uuucuuuuucuuccuuucuuuucuuuucuuuu

SEQ ID NO: 545018 - RNA, 32 nt, Human
uuucuuuuucuuucucuugcuguuuccuucuu

SEQ ID NO: 545019 - RNA, 32 nt, Human
uuucuuuuugacuuaguauccggcacacaaag

SEQ ID NO: 545020 - RNA, 32 nt, Human
uuucuuuuugacuuaguaucuggcacacaaag

SEQ ID NO: 545021 - RNA, 32 nt, Human
uuucuuuuugagacagagucucgcucuauugc

SEQ ID NO: 545022 - RNA, 32 nt, Human
uuucuuuuugagaccuagucucacucuguugc

SEQ ID NO: 545023 - RNA, 32 nt, Human
uuucuuuuugagacggaaucucacucuuucac

SEQ ID NO: 545024 - RNA, 32 nt, Human
uuucuuuuugagacggagucuuccucugucgc

SEQ ID NO: 545025 - RNA, 32 nt, Human
uuucuuuuugagacggaguuucgcuuuugucc

SEQ ID NO: 545026 - RNA, 32 nt, Human
uuucuuuuugagauggagucacacucuccagg

SEQ ID NO: 545027 - RNA, 32 nt, Human
uuucuuuuugagauggagucucgcucucuuga

SEQ ID NO: 545028 - RNA, 32 nt, Human
uuucuuuuugagauggagucucgcucugucgc

SEQ ID NO: 545029 - RNA, 32 nt, Human
uuucuuuuugagauggagucucgcucuguugc

SEQ ID NO: 545030 - RNA, 32 nt, Human
uuucuuuuugcccaggcuggagugcaguggcg

SEQ ID NO: 545031 - RNA, 23 nt, Human
uuucuuuuugucuuuuggguguu

SEQ ID NO: 545032 - RNA, 23 nt, Human
uuucuuuuuucuuuuagagcucg

SEQ ID NO: 545033 - RNA, 32 nt, Human
uuugaaaaaccagcugagcagaaugccauguu

SEQ ID NO: 545034 - RNA, 32 nt, Human
uuugaaaaauacacacgaauguccucaguauc

SEQ ID NO: 545035 - RNA, 32 nt, Human
uuugaaaaauaccauaauggcauuugagacug

SEQ ID NO: 545036 - RNA, 32 nt, Human
uuugaaaacauacacugagcugcuucugcgcu

SEQ ID NO: 545037 - RNA, 32 nt, Human
uuugaaaaccacugccccagacagcaauaugu

SEQ ID NO: 545038 - RNA, 32 nt, Human
uuugaaaaccugcagcauucccauugaagcca

SEQ ID NO: 545039 - RNA, 32 nt, Human
uuugaaaacugggccucccugcucugugauug

SEQ ID NO: 545040 - RNA, 32 nt, Human
uuugaaaagagaaaccuaauuggcuauuuaau

SEQ ID NO: 545041 - RNA, 32 nt, Human
uuugaaaagaggugugcaagagagggaugcau

SEQ ID NO: 545042 - RNA, 32 nt, Human
uuugaaaagauaagcaaaauuuauagacuauu

SEQ ID NO: 545043 - RNA, 32 nt, Human
uuugaaaagccagcucucccuggcagagaaag

SEQ ID NO: 545044 - RNA, 32 nt, Human
uuugaaaaggaaaucuagcaugugaggggacu

SEQ ID NO: 545045 - RNA, 32 nt, Human
uuugaaacagcuguuuuucccacauuugcugc

SEQ ID NO: 545046 - RNA, 32 nt, Human
uuugaaacauagugcuucuacuuguugaauga

SEQ ID NO: 545047 - RNA, 32 nt, Human
uuugaaacaugcggguuugaaauaugacaccu

SEQ ID NO: 545048 - RNA, 32 nt, Human
uuugaaaccaacagcagauguugcaaacuuuc

SEQ ID NO: 545049 - RNA, 32 nt, Human
uuugaaaccagcauggccaacagaugugagcc

SEQ ID NO: 545050 - RNA, 32 nt, Human
uuugaaaccagccuagguaacauagugagacc

SEQ ID NO: 545051 - RNA, 32 nt, Human
uuugaaaccagccuggacuacauggugaaacu

SEQ ID NO: 545052 - RNA, 32 nt, Human
uuugaaaccagccuggccaacauggcgaaacc

SEQ ID NO: 545053 - RNA, 32 nt, Human
uuugaaaccagccuggccaacauggugaaaac

SEQ ID NO: 545054 - RNA, 32 nt, Human
uuugaaaccagccuggccaacauggugaaacc

SEQ ID NO: 545055 - RNA, 32 nt, Human
uuugaaaccagccuggccaacauggugaaauu

SEQ ID NO: 545056 - RNA, 32 nt, Human
uuugaaaccagccugggcaacauggugaaacc

SEQ ID NO: 545057 - RNA, 32 nt, Human
uuugaaaccagccuggguaacauggcaaaauc

SEQ ID NO: 545058 - RNA, 32 nt, Human
uuugaaaccagcuguuucccaaacucugcuuc

SEQ ID NO: 545059 - RNA, 32 nt, Human
uuugaaaccaggaguucaggaccagccuggaa

SEQ ID NO: 545060 - RNA, 32 nt, Human
uuugaaaccuaccuaggcaacauggugaaacc

SEQ ID NO: 545061 - RNA, 32 nt, Human
uuugaaacuagccuggccaacguggcaaaacu

SEQ ID NO: 545062 - RNA, 32 nt, Human
uuugaaacuagucuggucaacauggugaaacc

SEQ ID NO: 545063 - RNA, 32 nt, Human
uuugaaacugaccuuuuucugcgaaguucacg

SEQ ID NO: 545064 - RNA, 32 nt, Human
uuugaaacugauuucuagaaaaagcugacucc

SEQ ID NO: 545065 - RNA, 32 nt, Human
uuugaaacuguacaaauacauggaugugaaau

SEQ ID NO: 545066 - RNA, 32 nt, Human
uuugaaagacuuuuguuuuucuugacuuaauu

SEQ ID NO: 545067 - RNA, 32 nt, Human
uuugaaagagaccaaaucaggcccagaccgcc

SEQ ID NO: 545068 - RNA, 32 nt, Human
uuugaaagaugugaguuggcaaguuccucaca

SEQ ID NO: 545069 - RNA, 32 nt, Human
uuugaaagcaggucauguucacugcgaugcug

SEQ ID NO: 545070 - RNA, 32 nt, Human
uuugaaagcuguuucuguuuucauuuuacauu

SEQ ID NO: 545071 - RNA, 32 nt, Human
uuugaaaggagaaggaauuggagcagcuuuuc

SEQ ID NO: 545072 - RNA, 32 nt, Human
uuugaaaggagagugaaggcagagaugguuac

SEQ ID NO: 545073 - RNA, 32 nt, Human
uuugaaaggaugacaguucuguuuguuagaug

SEQ ID NO: 545074 - RNA, 32 nt, Human
uuugaaaggcauugugggucugucuuuaaagu

SEQ ID NO: 545075 - RNA, 32 nt, Human
uuugaaaggcuguuugaaagaggaauguuuaa

SEQ ID NO: 545076 - RNA, 32 nt, Human
uuugaaaguaggaacucuuaagcaaugguaau

SEQ ID NO: 545077 - RNA, 32 nt, Human
uuugaaaguauagagcaguaacacaguaacag

SEQ ID NO: 545078 - RNA, 32 nt, Human
uuugaaaguauguuuacaacaaacugauacua

SEQ ID NO: 545079 - RNA, 32 nt, Human
uuugaaaguucuaaccucuucuugcccuuaag

SEQ ID NO: 545080 - RNA, 28 nt, Human
uuugaaauaaauguuuccuguugaaaug

SEQ ID NO: 545081 - RNA, 31 nt, Human
uuugaaauaaauguuuccuguugaaaugaaa

SEQ ID NO: 545082 - RNA, 32 nt, Human
uuugaaauagccaaucugaauuggcuuagagu

SEQ ID NO: 545083 - RNA, 32 nt, Human
uuugaaauauccagacuuguagggaagaaaac

SEQ ID NO: 545084 - RNA, 32 nt, Human
uuugaaaucucaggacucuucuggccguaggu

SEQ ID NO: 545085 - RNA, 32 nt, Human
uuugaaaugaggaaacuuugauaggaugugga

SEQ ID NO: 545086 - RNA, 32 nt, Human
uuugaaauggcaguggcaaauaaauaaauacu

SEQ ID NO: 545087 - RNA, 32 nt, Human
uuugaaauguagagugcuuccuccuaaccauu

SEQ ID NO: 545088 - RNA, 32 nt, Human
uuugaaauuaucacccauauaaaagagggaca

SEQ ID NO: 545089 - RNA, 32 nt, Human
uuugaaauugauaccauuuucuacucacaaug

SEQ ID NO: 545090 - RNA, 32 nt, Human
uuugaaauuucgagguaaucuacuuuggagac

SEQ ID NO: 545091 - RNA, 32 nt, Human
uuugaaauuugcaaaugcuucccugcugucag

SEQ ID NO: 545092 - RNA, 32 nt, Human
uuugaacacguaaacaacacagacuucaagca

SEQ ID NO: 545093 - RNA, 32 nt, Human
uuugaacaucacuaaacaagcaaauggaauga

SEQ ID NO: 545094 - RNA, 32 nt, Human
uuugaacauuuucugaacuaaaaaccucuauu

SEQ ID NO: 545095 - RNA, 32 nt, Human
uuugaaccaaagcucaaaacaaucaagacccu

SEQ ID NO: 545096 - RNA, 32 nt, Human
uuugaaccaggauggcugagccccgccaggag

SEQ ID NO: 545097 - RNA, 32 nt, Human
uuugaaccagggaggcagagauugcagugagc

SEQ ID NO: 545098 - RNA, 32 nt, Human
uuugaaccaugagggcccucugcccaggugau

SEQ ID NO: 545099 - RNA, 32 nt, Human
uuugaacccaggacacggagauugcagugagc

SEQ ID NO: 545100 - RNA, 32 nt, Human
uuugaacccaggaggcacagguugcagugagc

SEQ ID NO: 545101 - RNA, 32 nt, Human
uuugaacccaggaggcagagguugcagcgagc

SEQ ID NO: 545102 - RNA, 32 nt, Human
uuugaacccaggaggcagagguugcagugagc

SEQ ID NO: 545103 - RNA, 32 nt, Human
uuugaacccaggaggcggagguugcagugacc

SEQ ID NO: 545104 - RNA, 32 nt, Human
uuugaacccaggaggcugagguugcagugagc

SEQ ID NO: 545105 - RNA, 32 nt, Human
uuugaacccaggagguggacauuacagugagc

SEQ ID NO: 545106 - RNA, 32 nt, Human
uuugaacccaggagguggaggcugcagugagc

SEQ ID NO: 545107 - RNA, 32 nt, Human
uuugaacccaggucuaccuguugcagagucaa

SEQ ID NO: 545108 - RNA, 32 nt, Human
uuugaaccccggagauggagguugcagugagc

SEQ ID NO: 545109 - RNA, 32 nt, Human
uuugaaccccggaggcagagguuucagugagc

SEQ ID NO: 545110 - RNA, 22 nt, Human
uuugaaccccuguaggcugcau

SEQ ID NO: 545111 - RNA, 32 nt, Human
uuugaacccgcccugcacugcugucugggcgg

SEQ ID NO: 545112 - RNA, 32 nt, Human
uuugaacccggcaggcggagguugcagugagc

SEQ ID NO: 545113 - RNA, 32 nt, Human
uuugaacccgggaagcggagguugcagggagc

SEQ ID NO: 545114 - RNA, 32 nt, Human
uuugaacccgggaggcagagguugcagugagc

SEQ ID NO: 545115 - RNA, 32 nt, Human
uuugaacccgggaggcagagguugcagugugg

SEQ ID NO: 545116 - RNA, 32 nt, Human
uuugaacccgggaggcagagguugugagcuga

SEQ ID NO: 545117 - RNA, 32 nt, Human
uuugaacccgggaggcggaggcugcagugagc

SEQ ID NO: 545118 - RNA, 32 nt, Human
uuugaacccgggaggcggagguugcagugagu

SEQ ID NO: 545119 - RNA, 32 nt, Human
uuugaacccggguggcagagguugcagugagc

SEQ ID NO: 545120 - RNA, 32 nt, Human
uuugaacccuggaggcagagguuguagugagu

SEQ ID NO: 545121 - RNA, 32 nt, Human
uuugaacccugggaugcucuaauuggcugguu

SEQ ID NO: 545122 - RNA, 32 nt, Human
uuugaaccuaggaggcagagguugcagugaac

SEQ ID NO: 545123 - RNA, 32 nt, Human
uuugaaccuaggccaucuccugaggccuuuuc

SEQ ID NO: 545124 - RNA, 32 nt, Human
uuugaaccuccaggauuccacggugcuguccc

SEQ ID NO: 545125 - RNA, 32 nt, Human
uuugaaccuggaaggcggagguugcagugagc

SEQ ID NO: 545126 - RNA, 32 nt, Human
uuugaaccugggaggcagagguugcagugagc

SEQ ID NO: 545127 - RNA, 32 nt, Human
uuugaaccugggaggcggaggcugcagugagc

SEQ ID NO: 545128 - RNA, 32 nt, Human
uuugaaccugggaggcggagguugcagugagc

SEQ ID NO: 545129 - RNA, 32 nt, Human
uuugaaccugggaggcggggguuguggugagc

SEQ ID NO: 545130 - RNA, 32 nt, Human
uuugaaccugggagggggagguugccgugagc

SEQ ID NO: 545131 - RNA, 32 nt, Human
uuugaaccugggagguggagguugcagugagc

SEQ ID NO: 545132 - RNA, 32 nt, Human
uuugaaccuuuccuuccugcuuucuuuccagc

SEQ ID NO: 545133 - RNA, 32 nt, Human
uuugaacgucagugucacuuacccacaaaguu

SEQ ID NO: 545134 - RNA, 32 nt, Human
uuugaacuauuuauuucugaaaggacauguua

SEQ ID NO: 545135 - RNA, 32 nt, Human
uuugaacucaggaggcagagguugcaaugagc

SEQ ID NO: 545136 - RNA, 32 nt, Human
uuugaacucauucauguugagagggugucaaa

SEQ ID NO: 545137 - RNA, 32 nt, Human
uuugaacucuuucaggugcuuguccugccuac

SEQ ID NO: 545138 - RNA, 32 nt, Human
uuugaacugucaaaugaaaagagcucuaggcg

SEQ ID NO: 545139 - RNA, 32 nt, Human
uuugaacuugagggagaugauuuuggguaccu

SEQ ID NO: 545140 - RNA, 32 nt, Human
uuugaagaaagagaaaccagguauucugcuac

SEQ ID NO: 545141 - RNA, 32 nt, Human
uuugaagaacuuguggcauuuguuaaagaauc

SEQ ID NO: 545142 - RNA, 32 nt, Human
uuugaagaaggcauccagaagcuguaucagug

SEQ ID NO: 545143 - RNA, 32 nt, Human
uuugaagacaagaaaagugcuagaauaaauaa

SEQ ID NO: 545144 - RNA, 32 nt, Human
uuugaagacagaaaucugcauuuagaaucaga

SEQ ID NO: 545145 - RNA, 32 nt, Human
uuugaagaccaggguaugggcacuuuugccuu

SEQ ID NO: 545146 - RNA, 32 nt, Human
uuugaagacuaugguacagauugcgacaacau

SEQ ID NO: 545147 - RNA, 32 nt, Human
uuugaagaggacacuugugaaaagcaugcaca

SEQ ID NO: 545148 - RNA, 32 nt, Human
uuugaagauaaauagcaacuuuaucaaaguga

SEQ ID NO: 545149 - RNA, 32 nt, Human
uuugaagaugugaguauauuuaucucaguuuc

SEQ ID NO: 545150 - RNA, 32 nt, Human
uuugaagauuaggaggagaaaaagaggagcuu

SEQ ID NO: 545151 - RNA, 32 nt, Human
uuugaagcaaaauacauguacacuucaaagag

SEQ ID NO: 545152 - RNA, 32 nt, Human
uuugaagcagcagguccaggucacuuuguaau

SEQ ID NO: 545153 - RNA, 32 nt, Human
uuugaagcagcucugccuucuuagggcuaccc

SEQ ID NO: 545154 - RNA, 32 nt, Human
uuugaagcagucuugcucuguuacccaggcug

SEQ ID NO: 545155 - RNA, 32 nt, Human
uuugaagcccccaggggugggguggacgcgug

SEQ ID NO: 545156 - RNA, 32 nt, Human
uuugaagccuuucuaagaaagaaaugggggug

SEQ ID NO: 545157 - RNA, 32 nt, Human
uuugaagcuacugcugccuccauuucugggaa

SEQ ID NO: 545158 - RNA, 32 nt, Human
uuugaagcucuuccuuuugcacauacggcuuu

SEQ ID NO: 545159 - RNA, 32 nt, Human
uuugaagcugggaggcagaguuuucagugagc

SEQ ID NO: 545160 - RNA, 32 nt, Human
uuugaagcuucaaacuuagugcugcugcagac

SEQ ID NO: 545161 - RNA, 32 nt, Human
uuugaagcuuuauccauguaucauguuccgug

SEQ ID NO: 545162 - RNA, 32 nt, Human
uuugaagcuuucuggaccuguggucuuagucc

SEQ ID NO: 545163 - RNA, 32 nt, Human
uuugaaggaaauauacugggcuucauucauuc

SEQ ID NO: 545164 - RNA, 32 nt, Human
uuugaagggaggacgggagcuggggagaggaa

SEQ ID NO: 545165 - RNA, 32 nt, Human
uuugaagguacuugugcacaucagaacacugg

SEQ ID NO: 545166 - RNA, 32 nt, Human
uuugaaggucucaagcagaaccucacaucuuc

SEQ ID NO: 545167 - RNA, 32 nt, Human
uuugaaguaauaacugccacaugugggaagua

SEQ ID NO: 545168 - RNA, 31 nt, Human
uuugaaguacaguggaaucuguugaaucaga

SEQ ID NO: 545169 - RNA, 32 nt, Human
uuugaagucacagugaggcggccacaccuggu

SEQ ID NO: 545170 - RNA, 32 nt, Human
uuugaagucaucuuagcuuuccacaggaggga

SEQ ID NO: 545171 - RNA, 32 nt, Human
uuugaagucuuccuccucugugucuucccaag

SEQ ID NO: 545172 - RNA, 32 nt, Human
uuugaaguggacuuugaaagucauggggguuu

SEQ ID NO: 545173 - RNA, 32 nt, Human
uuugaaguuuagagaauccugguauuucagug

SEQ ID NO: 545174 - RNA, 32 nt, Human
uuugaaguuuggagaagaaagggauuugguaa

SEQ ID NO: 545175 - RNA, 32 nt, Human
uuugaauaagcacagauucuggcauugaaagc

SEQ ID NO: 545176 - RNA, 32 nt, Human
uuugaauaaugguuuugguuaccugggaaggc

SEQ ID NO: 545177 - RNA, 32 nt, Human
uuugaauacuuguuucuuuagcacuuugaaga

SEQ ID NO: 545178 - RNA, 32 nt, Human
uuugaauauuaagcuaaaagguuuccacuauu

SEQ ID NO: 545179 - RNA, 32 nt, Human
uuugaaucaagggggcgguuucccccauauug

SEQ ID NO: 545180 - RNA, 32 nt, Human
uuugaaucacuccugaauacagaggcauauuc

SEQ ID NO: 545181 - RNA, 32 nt, Human
uuugaaucccuucacuuucuuccuuggacuua

SEQ ID NO: 545182 - RNA, 32 nt, Human
uuugaauccugccucuccgucugcuagggaua

SEQ ID NO: 545183 - RNA, 32 nt, Human
uuugaauccugccucugccauuuccuggcuau

SEQ ID NO: 545184 - RNA, 32 nt, Human
uuugaaucuaugcaauauugacuuuaauacca

SEQ ID NO: 545185 - RNA, 32 nt, Human
uuugaaucucagucuucagccugcacugauuu

SEQ ID NO: 545186 - RNA, 32 nt, Human
uuugaaucugcugccaguucuggcucaaaugu

SEQ ID NO: 545187 - RNA, 32 nt, Human
uuugaaucugggaagcggagguugcagugagc

SEQ ID NO: 545188 - RNA, 32 nt, Human
uuugaaucugggacugugccuggcucccugau

SEQ ID NO: 545189 - RNA, 32 nt, Human
uuugaaugaagcccuaaaguaccacuuuaugc

SEQ ID NO: 545190 - RNA, 32 nt, Human
uuugaaugacccacccuuccugauuuuaagua

SEQ ID NO: 545191 - RNA, 32 nt, Human
uuugaaugagguacugggggccaagguguugg

SEQ ID NO: 545192 - RNA, 32 nt, Human
uuugaauggaaagugaccugugagagauugaa

SEQ ID NO: 545193 - RNA, 32 nt, Human
uuugaauggagacaggguuucaacauguuggc

SEQ ID NO: 545194 - RNA, 32 nt, Human
uuugaauuaaggcuaugauauuaagauagaaa

SEQ ID NO: 545195 - RNA, 32 nt, Human
uuugaauuaguccguuuucacacugcuauaaa

SEQ ID NO: 545196 - RNA, 32 nt, Human
uuugaauucccccagaagaguuguuuucaaaa

SEQ ID NO: 545197 - RNA, 32 nt, Human
uuugaauucgcgaggcagagguugcagcgaac

SEQ ID NO: 545198 - RNA, 32 nt, Human
uuugaauuggaaagagaagagugaagauccaa

SEQ ID NO: 545199 - RNA, 32 nt, Human
uuugaauuuccucaucccuccaucucaauccc

SEQ ID NO: 545200 - RNA, 32 nt, Human
uuugacaaacacagccaaggggauauuuacug

SEQ ID NO: 545201 - RNA, 32 nt, Human
uuugacaacaccucaaacuuuucuaaccauaa

SEQ ID NO: 545202 - RNA, 22 nt, Human
uuugacaauguggagcagcaca

SEQ ID NO: 545203 - RNA, 32 nt, Human
uuugacacauaaggaaauacacucugaaagau

SEQ ID NO: 545204 - RNA, 32 nt, Human
uuugacaccagccugggcaacauagugagacc

SEQ ID NO: 545205 - RNA, 32 nt, Human
uuugacaccagccugggcaacaugguaagacc

SEQ ID NO: 545206 - RNA, 32 nt, Human
uuugacacccaggcuggagugcaguggugcca

SEQ ID NO: 545207 - RNA, 32 nt, Human
uuugacacugguucuggccuuuccugccuuuu

SEQ ID NO: 545208 - RNA, 32 nt, Human
uuugacagaggagaaaaauuagccaaggaaga

SEQ ID NO: 545209 - RNA, 32 nt, Human
uuugacagagucucagucugucacccaggcug

SEQ ID NO: 545210 - RNA, 32 nt, Human
uuugacagaguggcugaugucaaggagaacaa

SEQ ID NO: 545211 - RNA, 32 nt, Human
uuugacagaguguuggaugugucaugucauca

SEQ ID NO: 545212 - RNA, 24 nt, Human
uuugacagccuuauaugacaugaa

SEQ ID NO: 545213 - RNA, 32 nt, Human
uuugacagcuaccucuggacaucucaagggcu

SEQ ID NO: 545214 - RNA, 32 nt, Human
uuugacagcugccagucuuccugccccuuuca

SEQ ID NO: 545215 - RNA, 32 nt, Human
uuugacagcuggucccugccucgguugauugu

SEQ ID NO: 545216 - RNA, 32 nt, Human
uuugacaggaaggggcuucaguuguuccucca

SEQ ID NO: 545217 - RNA, 32 nt, Human
uuugacaggaggagaauaaggcugaaagccuc

SEQ ID NO: 545218 - RNA, 32 nt, Human
uuugacaggguccucaguacaucagacaccca

SEQ ID NO: 545219 - RNA, 32 nt, Human
uuugacagggucucacucugucacccaggcug

SEQ ID NO: 545220 - RNA, 32 nt, Human
uuugacagggucucacucuguugcccaagcug

SEQ ID NO: 545221 - RNA, 32 nt, Human
uuugacagucccuuuguacacacugcuaugca

SEQ ID NO: 545222 - RNA, 30 nt, Human
uuugacagucuccuagugcuccugguagug

SEQ ID NO: 545223 - RNA, 32 nt, Human
uuugacauaugucuguaccugggaaaccauca

SEQ ID NO: 545224 - RNA, 32 nt, Human
uuugacaucaaccugggcaacauggugaccuc

SEQ ID NO: 545225 - RNA, 32 nt, Human
uuugacaucuuucuguggcaaagcucuuagaa

SEQ ID NO: 545226 - RNA, 32 nt, Human
uuugacaugacaaagauauaggugcuuaguuu

SEQ ID NO: 545227 - RNA, 32 nt, Human
uuugacauggccuuagugaguccugccuuucc

SEQ ID NO: 545228 - RNA, 32 nt, Human
uuugacaugggggugccaggugccaucaucuc

SEQ ID NO: 545229 - RNA, 32 nt, Human
uuugacauguacaguauguuuucaugccguug

SEQ ID NO: 545230 - RNA, 32 nt, Human
uuugacauuggagaauuggagugcagucauaa

SEQ ID NO: 545231 - RNA, 32 nt, Human
uuugaccaaguauuccaagaggccccauggag

SEQ ID NO: 545232 - RNA, 32 nt, Human
uuugaccacagguauccucuucaucagagaga

SEQ ID NO: 545233 - RNA, 32 nt, Human
uuugaccacuaugcaaccuaagccaugguccc

SEQ ID NO: 545234 - RNA, 32 nt, Human
uuugaccacuugugacuggaguucaguggccc

SEQ ID NO: 545235 - RNA, 32 nt, Human
uuugaccagucugacuuggugcagcccaugcu

SEQ ID NO: 545236 - RNA, 32 nt, Human
uuugaccauguuggccaggauggucucgauau

SEQ ID NO: 545237 - RNA, 32 nt, Human
uuugacccaaaucagggauuuccccaguccac

SEQ ID NO: 545238 - RNA, 32 nt, Human
uuugacccaguuuggaauguaucugcaauugu

SEQ ID NO: 545239 - RNA, 32 nt, Human
uuugacccccaggcuggagugcaguggcacga

SEQ ID NO: 545240 - RNA, 32 nt, Human
uuugacccgcccccuucucgcucauaaugaca

SEQ ID NO: 545241 - RNA, 32 nt, Human
uuugaccggugcaggugugaccagagaccacc

SEQ ID NO: 545242 - RNA, 32 nt, Human
uuugaccguguuagccaggauggucuugaucu

SEQ ID NO: 545243 - RNA, 32 nt, Human
uuugaccuaauggagcuagaaauaugucugug

SEQ ID NO: 545244 - RNA, 32 nt, Human
uuugaccucuguccugggcuccugggccaggu

SEQ ID NO: 545245 - RNA, 32 nt, Human
uuugaccugaugaccucaucccagcccuugau

SEQ ID NO: 545246 - RNA, 32 nt, Human
uuugaccugccugucccccucccucuugucuu

SEQ ID NO: 545247 - RNA, 32 nt, Human
uuugaccuuagacugcacuccccuucuuuauu

SEQ ID NO: 545248 - RNA, 32 nt, Human
uuugaccuucuaaaauguuuuuauguuagcac

SEQ ID NO: 545249 - RNA, 32 nt, Human
uuugaccuugcccuuggcagugccccacaucc

SEQ ID NO: 545250 - RNA, 32 nt, Human
uuugacggagucuugcucgguucgcccaggcu

SEQ ID NO: 545251 - RNA, 32 nt, Human
uuugacguggguggccagcgcgaugaacgccg

SEQ ID NO: 545252 - RNA, 28 nt, Human
uuugacguucaauaaaacuguugaaucu

SEQ ID NO: 545253 - RNA, 32 nt, Human
uuugacuaagcacaauuagaugacaaguuuuu

SEQ ID NO: 545254 - RNA, 32 nt, Human
uuugacuaagggcagaauucucagaacaaaac

SEQ ID NO: 545255 - RNA, 32 nt, Human
uuugacuacucugcuuuuaauuuaauaccagu

SEQ ID NO: 545256 - RNA, 32 nt, Human
uuugacuauguuggccaggcuagucuugaacu

SEQ ID NO: 545257 - RNA, 32 nt, Human
uuugacuauugcugcucuucaccagaaccuca

SEQ ID NO: 545258 - RNA, 32 nt, Human
uuugacucacugcaaccuccgccuccuggguu

SEQ ID NO: 545259 - RNA, 32 nt, Human
uuugacucuaaagucaagagcuucauucccug

SEQ ID NO: 545260 - RNA, 32 nt, Human
uuugacucuggucugaaaagauaaaagaaugu

SEQ ID NO: 545261 - RNA, 32 nt, Human
uuugacucuuaaaagaaauucauuucugaaau

SEQ ID NO: 545262 - RNA, 32 nt, Human
uuugacucuuccagcacccauggaugugccag

SEQ ID NO: 545263 - RNA, 32 nt, Human
uuugacugacaauucauuuuacacucuauaua

SEQ ID NO: 545264 - RNA, 32 nt, Human
uuugacugacgcuguuuagucuuucuguacau

SEQ ID NO: 545265 - RNA, 21 nt, Human
uuugacugccaccauugcaac

SEQ ID NO: 545266 - RNA, 32 nt, Human
uuugacuguaauugcguuaaaucuuuugagaa

SEQ ID NO: 545267 - RNA, 32 nt, Human
uuugacuguaccauugacuguuauggaaguuc

SEQ ID NO: 545268 - RNA, 32 nt, Human
uuugacugucuccagaccucaggggagcuggg

SEQ ID NO: 545269 - RNA, 32 nt, Human
uuugacuguggaaggguguauuuugcuggaau

SEQ ID NO: 545270 - RNA, 32 nt, Human
uuugacuucagccauggaugaggagugggaug

SEQ ID NO: 545271 - RNA, 32 nt, Human
uuugacuugcccacagucauggucucuguaga

SEQ ID NO: 545272 - RNA, 32 nt, Human
uuugacuugggugggaaggagggcgguggauu

SEQ ID NO: 545273 - RNA, 32 nt, Human
uuugacuugugacauuuucaggauuuacaaag

SEQ ID NO: 545274 - RNA, 32 nt, Human
uuugacuuugggacggagucucgcuuugucgc

SEQ ID NO: 545275 - RNA, 24 nt, Human
uuugagaaaaaggaaaggccccuu

SEQ ID NO: 545276 - RNA, 32 nt, Human
uuugagaaaagccaggcuucagaguuccugcu

SEQ ID NO: 545277 - RNA, 32 nt, Human
uuugagaaaauuaggggaaaggggaaaauuaa

SEQ ID NO: 545278 - RNA, 32 nt, Human
uuugagaacagccuggccaacacggugaaacc

SEQ ID NO: 545279 - RNA, 32 nt, Human
uuugagaacagccuggccaacagacgggagcc

SEQ ID NO: 545280 - RNA, 32 nt, Human
uuugagaacagccuggccaacauagugaaacu

SEQ ID NO: 545281 - RNA, 24 nt, Human
uuugagaacagccuggccaacaug

SEQ ID NO: 545282 - RNA, 32 nt, Human
uuugagaacagccuggccaacauggugaaacc

SEQ ID NO: 545283 - RNA, 32 nt, Human
uuugagaacagccuggccaacauggugaaacu

SEQ ID NO: 545284 - RNA, 32 nt, Human
uuugagaacagccuggccaacgugaugaaacc

SEQ ID NO: 545285 - RNA, 22 nt, Human
uuugagaacagccugggcaaca

SEQ ID NO: 545286 - RNA, 24 nt, Human
uuugagaacagccugggcaacaug

SEQ ID NO: 545287 - RNA, 32 nt, Human
uuugagaacagcuggccaagauggugaaaccc

SEQ ID NO: 545288 - RNA, 32 nt, Human
uuugagaacccauguauggguugcagugagcc

SEQ ID NO: 545289 - RNA, 32 nt, Human
uuugagaaguuuuggagaucucagggaaggau

SEQ ID NO: 545290 - RNA, 32 nt, Human
uuugagacaaagccacacucugucuccuuguc

SEQ ID NO: 545291 - RNA, 24 nt, Human
uuugagacaagccugagcaacaua

SEQ ID NO: 545292 - RNA, 32 nt, Human
uuugagacaagccugggcaacauagugagacc

SEQ ID NO: 545293 - RNA, 24 nt, Human
uuugagacaagccugggcauuaua

SEQ ID NO: 545294 - RNA, 32 nt, Human
uuugagacacagagucucauacucugccaccc

SEQ ID NO: 545295 - RNA, 32 nt, Human
uuugagacagagcgucucucucuguuacccag

SEQ ID NO: 545296 - RNA, 32 nt, Human
uuugagacagauucucacucugucucccaggc

SEQ ID NO: 545297 - RNA, 32 nt, Human
uuugagacagggucucacuguugcccaggcug

SEQ ID NO: 545298 - RNA, 32 nt, Human
uuugagacagucuugcuaugucacucaggcug

SEQ ID NO: 545299 - RNA, 32 nt, Human
uuugagacagucuugcucugucacccaggcug

SEQ ID NO: 545300 - RNA, 32 nt, Human
uuugagacagucuugcucugucaucaggcugg

SEQ ID NO: 545301 - RNA, 32 nt, Human
uuugagacagucuugcuguauugcccaggcug

SEQ ID NO: 545302 - RNA, 32 nt, Human
uuugagaccaacaugggcaacauggugaaaca

SEQ ID NO: 545303 - RNA, 32 nt, Human
uuugagaccaaccuagucaacauggugaaacc

SEQ ID NO: 545304 - RNA, 32 nt, Human
uuugagaccaaccuggccaacacagugagacc

SEQ ID NO: 545305 - RNA, 32 nt, Human
uuugagaccaaccuggccaacauggugaaacc

SEQ ID NO: 545306 - RNA, 32 nt, Human
uuugagaccaaccuggccaacauguugaaacc

SEQ ID NO: 545307 - RNA, 24 nt, Human
uuugagaccaaccugggcaauaua

SEQ ID NO: 545308 - RNA, 32 nt, Human
uuugagaccaaccugguuaacauggugaaacc

SEQ ID NO: 545309 - RNA, 32 nt, Human
uuugagaccaacuuggccaacauggugaaacc

SEQ ID NO: 545310 - RNA, 32 nt, Human
uuugagaccacccuggccaacauggugaaacc

SEQ ID NO: 545311 - RNA, 24 nt, Human
uuugagaccacccugggcaacaua

SEQ ID NO: 545312 - RNA, 32 nt, Human
uuugagaccacccugggcaacauagcgagacu

SEQ ID NO: 545313 - RNA, 32 nt, Human
uuugagaccaccuggccaacauggugaaaccc

SEQ ID NO: 545314 - RNA, 32 nt, Human
uuugagaccacggugaaacccugucucuacua

SEQ ID NO: 545315 - RNA, 32 nt, Human
uuugagaccagacuggccaacacagcgagacc

SEQ ID NO: 545316 - RNA, 24 nt, Human
uuugagaccagacugggcaacaug

SEQ ID NO: 545317 - RNA, 32 nt, Human
uuugagaccagacugggcaacauggugagacu

SEQ ID NO: 545318 - RNA, 32 nt, Human
uuugagaccagcaugaccaacauggcgaaacc

SEQ ID NO: 545319 - RNA, 24 nt, Human
uuugagaccagcaugggcaacaua

SEQ ID NO: 545320 - RNA, 32 nt, Human
uuugagaccagccaggccaacauggugaaacu

SEQ ID NO: 545321 - RNA, 32 nt, Human
uuugagaccagccagggcaacaaagugauacc

SEQ ID NO: 545322 - RNA, 24 nt, Human
uuugagaccagccagggcaacaua

SEQ ID NO: 545323 - RNA, 32 nt, Human
uuugagaccagcccaggcaacauggugaaacc

SEQ ID NO: 545324 - RNA, 32 nt, Human
uuugagaccagcccggacaacauggcgaaacc

SEQ ID NO: 545325 - RNA, 32 nt, Human
uuugagaccagcccggccaacauggugaaacc

SEQ ID NO: 545326 - RNA, 32 nt, Human
uuugagaccagccgggccaacauggugcaacc

SEQ ID NO: 545327 - RNA, 32 nt, Human
uuugagaccagccuagacaacauggugaaacc

SEQ ID NO: 545328 - RNA, 32 nt, Human
uuugagaccagccuagccaacaugcugaaacu

SEQ ID NO: 545329 - RNA, 32 nt, Human
uuugagaccagccuagccaacauggugaaauc

SEQ ID NO: 545330 - RNA, 24 nt, Human
uuugagaccagccuaggcaacaca

SEQ ID NO: 545331 - RNA, 32 nt, Human
uuugagaccagccuaggcaacacagugaaacc

SEQ ID NO: 545332 - RNA, 24 nt, Human
uuugagaccagccuaggcaacaua

SEQ ID NO: 545333 - RNA, 32 nt, Human
uuugagaccagccuaggcaacauagcaagacc

SEQ ID NO: 545334 - RNA, 24 nt, Human
uuugagaccagccuaggcaacaug

SEQ ID NO: 545335 - RNA, 32 nt, Human
uuugagaccagccuaggcaacauugcaagacu

SEQ ID NO: 545336 - RNA, 24 nt, Human
uuugagaccagccuaggcagcaua

SEQ ID NO: 545337 - RNA, 32 nt, Human
uuugagaccagccuaggugacaaagugagacc

SEQ ID NO: 545338 - RNA, 32 nt, Human
uuugagaccagccuagucaacaugaggaaacc

SEQ ID NO: 545339 - RNA, 32 nt, Human
uuugagaccagccucaccaacauggagaaauc

SEQ ID NO: 545340 - RNA, 32 nt, Human
uuugagaccagccucaucaacacagugaaacu

SEQ ID NO: 545341 - RNA, 32 nt, Human
uuugagaccagccuccuggccaacauggugaa

SEQ ID NO: 545342 - RNA, 32 nt, Human
uuugagaccagccucgccaacauggugaaacc

SEQ ID NO: 545343 - RNA, 32 nt, Human
uuugagaccagccucgccaacauggugagacc

SEQ ID NO: 545344 - RNA, 32 nt, Human
uuugagaccagccucggcaacauggcaaaauc

SEQ ID NO: 545345 - RNA, 32 nt, Human
uuugagaccagccugacauggugaaaccccau

SEQ ID NO: 545346 - RNA, 32 nt, Human
uuugagaccagccugaccaaaauggugaaacc

SEQ ID NO: 545347 - RNA, 32 nt, Human
uuugagaccagccugaccaaacauggcgaaac

SEQ ID NO: 545348 - RNA, 32 nt, Human
uuugagaccagccugaccaacauagagaaacc

SEQ ID NO: 545349 - RNA, 32 nt, Human
uuugagaccagccugaccaacauaguuucacc

SEQ ID NO: 545350 - RNA, 32 nt, Human
uuugagaccagccugaccaacauggagaaacc

SEQ ID NO: 545351 - RNA, 32 nt, Human
uuugagaccagccugaccaacauggcaaaacc

SEQ ID NO: 545352 - RNA, 32 nt, Human
uuugagaccagccugaccaacauggugaaacc

SEQ ID NO: 545353 - RNA, 32 nt, Human
uuugagaccagccugaccaacauggugaaacu

SEQ ID NO: 545354 - RNA, 32 nt, Human
uuugagaccagccugaccaacauggugaaauc

SEQ ID NO: 545355 - RNA, 32 nt, Human
uuugagaccagccugaccaacauggugaaaug

SEQ ID NO: 545356 - RNA, 32 nt, Human
uuugagaccagccugaccaacguggagaaacc

SEQ ID NO: 545357 - RNA, 32 nt, Human
uuugagaccagccugaccaacguggugaaacc

SEQ ID NO: 545358 - RNA, 32 nt, Human
uuugagaccagccugaccaacguuaaguaacc

SEQ ID NO: 545359 - RNA, 32 nt, Human
uuugagaccagccugaccaagguggugaaacc

SEQ ID NO: 545360 - RNA, 32 nt, Human
uuugagaccagccugaccaucauggugaaacc

SEQ ID NO: 545361 - RNA, 32 nt, Human
uuugagaccagccugacuaacacagugaaacc

SEQ ID NO: 545362 - RNA, 32 nt, Human
uuugagaccagccugagcaacaaagcaagacc

SEQ ID NO: 545363 - RNA, 24 nt, Human
uuugagaccagccugagcaacaua

SEQ ID NO: 545364 - RNA, 32 nt, Human
uuugagaccagccugagcaacauagcaaaacc

SEQ ID NO: 545365 - RNA, 32 nt, Human
uuugagaccagccugagcaacauagcgagacc

SEQ ID NO: 545366 - RNA, 24 nt, Human
uuugagaccagccugagcaaugug

SEQ ID NO: 545367 - RNA, 32 nt, Human
uuugagaccagccugagcaauguggugaaacc

SEQ ID NO: 545368 - RNA, 32 nt, Human
uuugagaccagccugagugacauagugagacu

SEQ ID NO: 545369 - RNA, 32 nt, Human
uuugagaccagccugaucaacauggugaaacc

SEQ ID NO: 545370 - RNA, 32 nt, Human
uuugagaccagccugaucaacguggugaaacc

SEQ ID NO: 545371 - RNA, 32 nt, Human
uuugagaccagccugcccaacauggugaaacc

SEQ ID NO: 545372 - RNA, 32 nt, Human
uuugagaccagccuggacaacaaacaugcuga

SEQ ID NO: 545373 - RNA, 32 nt, Human
uuugagaccagccuggacaacacagugagacc

SEQ ID NO: 545374 - RNA, 24 nt, Human
uuugagaccagccuggacaacaua

SEQ ID NO: 545375 - RNA, 32 nt, Human
uuugagaccagccuggacaacauaaugagacc

SEQ ID NO: 545376 - RNA, 24 nt, Human
uuugagaccagccuggacaacaug

SEQ ID NO: 545377 - RNA, 32 nt, Human
uuugagaccagccuggacaacaugggaaaacc

SEQ ID NO: 545378 - RNA, 32 nt, Human
uuugagaccagccuggacaacauggugaaacc

SEQ ID NO: 545379 - RNA, 32 nt, Human
uuugagaccagccuggcaaacauggcaaaacu

SEQ ID NO: 545380 - RNA, 32 nt, Human
uuugagaccagccuggcaaacauggugaaacc

SEQ ID NO: 545381 - RNA, 23 nt, Human
uuugagaccagccuggcaacaca

SEQ ID NO: 545382 - RNA, 32 nt, Human
uuugagaccagccuggcaacacagcaagaccc

SEQ ID NO: 545383 - RNA, 23 nt, Human
uuugagaccagccuggcaacaua

SEQ ID NO: 545384 - RNA, 32 nt, Human
uuugagaccagccuggccaaauggugaaaccc

SEQ ID NO: 545385 - RNA, 32 nt, Human
uuugagaccagccuggccaacacaguaaaccc

SEQ ID NO: 545386 - RNA, 32 nt, Human
uuugagaccagccuggccaacacggcaaaacc

SEQ ID NO: 545387 - RNA, 32 nt, Human
uuugagaccagccuggccaacacggugaaacc

SEQ ID NO: 545388 - RNA, 32 nt, Human
uuugagaccagccuggccaacagacgggagcc

SEQ ID NO: 545389 - RNA, 32 nt, Human
uuugagaccagccuggccaacagggugaaacc

SEQ ID NO: 545390 - RNA, 24 nt, Human
uuugagaccagccuggccaacaua

SEQ ID NO: 545391 - RNA, 32 nt, Human
uuugagaccagccuggccaacauaauuaaaau

SEQ ID NO: 545392 - RNA, 32 nt, Human
uuugagaccagccuggccaacauagugaaacc

SEQ ID NO: 545393 - RNA, 32 nt, Human
uuugagaccagccuggccaacauauagugaaa

SEQ ID NO: 545394 - RNA, 24 nt, Human
uuugagaccagccuggccaacaug

SEQ ID NO: 545395 - RNA, 32 nt, Human
uuugagaccagccuggccaacaugaugaaacc

SEQ ID NO: 545396 - RNA, 32 nt, Human
uuugagaccagccuggccaacaugaugaaaug

SEQ ID NO: 545397 - RNA, 32 nt, Human
uuugagaccagccuggccaacaugccgaaacc

SEQ ID NO: 545398 - RNA, 32 nt, Human
uuugagaccagccuggccaacaugcugaaacc

SEQ ID NO: 545399 - RNA, 32 nt, Human
uuugagaccagccuggccaacauggagaaacc

SEQ ID NO: 545400 - RNA, 32 nt, Human
uuugagaccagccuggccaacauggcaaaaac

SEQ ID NO: 545401 - RNA, 32 nt, Human
uuugagaccagccuggccaacauggcaaaacc

SEQ ID NO: 545402 - RNA, 32 nt, Human
uuugagaccagccuggccaacauggcgaaacc

SEQ ID NO: 545403 - RNA, 32 nt, Human
uuugagaccagccuggccaacauggcgagacc

SEQ ID NO: 545404 - RNA, 32 nt, Human
uuugagaccagccuggccaacauggcggaacc

SEQ ID NO: 545405 - RNA, 32 nt, Human
uuugagaccagccuggccaacaugguaaaaca

SEQ ID NO: 545406 - RNA, 32 nt, Human
uuugagaccagccuggccaacaugguaaaacc

SEQ ID NO: 545407 - RNA, 32 nt, Human
uuugagaccagccuggccaacaugguaaaacg

SEQ ID NO: 545408 - RNA, 32 nt, Human
uuugagaccagccuggccaacaugguaaaauc

SEQ ID NO: 545409 - RNA, 32 nt, Human
uuugagaccagccuggccaacauggugaaaca

SEQ ID NO: 545410 - RNA, 32 nt, Human
uuugagaccagccuggccaacauggugaaacc

SEQ ID NO: 545411 - RNA, 32 nt, Human
uuugagaccagccuggccaacauggugaaauc

SEQ ID NO: 545412 - RNA, 32 nt, Human
uuugagaccagccuggccaacauggugaagcu

SEQ ID NO: 545413 - RNA, 32 nt, Human
uuugagaccagccuggccaacauggugagacc

SEQ ID NO: 545414 - RNA, 32 nt, Human
uuugagaccagccuggccaacauggugauauc

SEQ ID NO: 545415 - RNA, 32 nt, Human
uuugagaccagccuggccaacaugguggaacc

SEQ ID NO: 545416 - RNA, 32 nt, Human
uuugagaccagccuggccaaccaacaugguga

SEQ ID NO: 545417 - RNA, 32 nt, Human
uuugagaccagccuggccaacguagugaaacc

SEQ ID NO: 545418 - RNA, 24 nt, Human
uuugagaccagccuggccaacgug

SEQ ID NO: 545419 - RNA, 32 nt, Human
uuugagaccagccuggccaacguggcaaaacc

SEQ ID NO: 545420 - RNA, 32 nt, Human
uuugagaccagccuggccaacguggugaaacc

SEQ ID NO: 545421 - RNA, 32 nt, Human
uuugagaccagccuggccaagauggugaaacc

SEQ ID NO: 545422 - RNA, 24 nt, Human
uuugagaccagccuggccaauaug

SEQ ID NO: 545423 - RNA, 32 nt, Human
uuugagaccagccuggccaauauggcaaaacc

SEQ ID NO: 545424 - RNA, 32 nt, Human
uuugagaccagccuggccaauauggcgaaacc

SEQ ID NO: 545425 - RNA, 32 nt, Human
uuugagaccagccuggccaauauggugaaacc

SEQ ID NO: 545426 - RNA, 24 nt, Human
uuugagaccagccuggccaaugug

SEQ ID NO: 545427 - RNA, 32 nt, Human
uuugagaccagccuggccaauguggugaaacc

SEQ ID NO: 545428 - RNA, 32 nt, Human
uuugagaccagccuggccaccauggugagacc

SEQ ID NO: 545429 - RNA, 24 nt, Human
uuugagaccagccuggccagcaug

SEQ ID NO: 545430 - RNA, 32 nt, Human
uuugagaccagccuggccagcauggcgaaacc

SEQ ID NO: 545431 - RNA, 32 nt, Human
uuugagaccagccuggccagcauggugaaacc

SEQ ID NO: 545432 - RNA, 32 nt, Human
uuugagaccagccuggcccacauggugaaacc

SEQ ID NO: 545433 - RNA, 24 nt, Human
uuugagaccagccuggccgacaug

SEQ ID NO: 545434 - RNA, 32 nt, Human
uuugagaccagccuggccgacauggugaaacc

SEQ ID NO: 545435 - RNA, 32 nt, Human
uuugagaccagccuggcuaacauggugaaauc

SEQ ID NO: 545436 - RNA, 32 nt, Human
uuugagaccagccuggcugacaggguaaaacc

SEQ ID NO: 545437 - RNA, 32 nt, Human
uuugagaccagccuggcuugaaccugggaggc

SEQ ID NO: 545438 - RNA, 32 nt, Human
uuugagaccagccugggaaacaucugccucua

SEQ ID NO: 545439 - RNA, 24 nt, Human
uuugagaccagccugggcaaaaca

SEQ ID NO: 545440 - RNA, 32 nt, Human
uuugagaccagccugggcaaaacagugggacc

SEQ ID NO: 545441 - RNA, 22 nt, Human
uuugagaccagccugggcaaca

SEQ ID NO: 545442 - RNA, 32 nt, Human
uuugagaccagccugggcaacaaagugagacc

SEQ ID NO: 545443 - RNA, 23 nt, Human
uuugagaccagccugggcaacac

SEQ ID NO: 545444 - RNA, 24 nt, Human
uuugagaccagccugggcaacaca

SEQ ID NO: 545445 - RNA, 32 nt, Human
uuugagaccagccugggcaacacagggagacu

SEQ ID NO: 545446 - RNA, 32 nt, Human
uuugagaccagccugggcaacacggugaaacc

SEQ ID NO: 545447 - RNA, 32 nt, Human
uuugagaccagccugggcaacagagugagacu

SEQ ID NO: 545448 - RNA, 32 nt, Human
uuugagaccagccugggcaacaggguaagguc

SEQ ID NO: 545449 - RNA, 24 nt, Human
uuugagaccagccugggcaacaua

SEQ ID NO: 545450 - RNA, 32 nt, Human
uuugagaccagccugggcaacauagcaaaacc

SEQ ID NO: 545451 - RNA, 32 nt, Human
uuugagaccagccugggcaacauagcaagacc

SEQ ID NO: 545452 - RNA, 32 nt, Human
uuugagaccagccugggcaacauagcaagauc

SEQ ID NO: 545453 - RNA, 32 nt, Human
uuugagaccagccugggcaacauagcgagacc

SEQ ID NO: 545454 - RNA, 32 nt, Human
uuugagaccagccugggcaacauagggaggcc

SEQ ID NO: 545455 - RNA, 32 nt, Human
uuugagaccagccugggcaacauaguaagacc

SEQ ID NO: 545456 - RNA, 32 nt, Human
uuugagaccagccugggcaacauagugagacu

SEQ ID NO: 545457 - RNA, 32 nt, Human
uuugagaccagccugggcaacauagugagauc

SEQ ID NO: 545458 - RNA, 32 nt, Human
uuugagaccagccugggcaacauagugaggcc

SEQ ID NO: 545459 - RNA, 32 nt, Human
uuugagaccagccugggcaacauagugaguga

SEQ ID NO: 545460 - RNA, 32 nt, Human
uuugagaccagccugggcaacauagugauacc

SEQ ID NO: 545461 - RNA, 32 nt, Human
uuugagaccagccugggcaacaucaggagauc

SEQ ID NO: 545462 - RNA, 32 nt, Human
uuugagaccagccugggcaacaucaugagacg

SEQ ID NO: 545463 - RNA, 24 nt, Human
uuugagaccagccugggcaacaug

SEQ ID NO: 545464 - RNA, 32 nt, Human
uuugagaccagccugggcaacaugaugaaaac

SEQ ID NO: 545465 - RNA, 32 nt, Human
uuugagaccagccugggcaacauggagaaacc

SEQ ID NO: 545466 - RNA, 32 nt, Human
uuugagaccagccugggcaacauggagagacc

SEQ ID NO: 545467 - RNA, 32 nt, Human
uuugagaccagccugggcaacauggcaaaacc

SEQ ID NO: 545468 - RNA, 32 nt, Human
uuugagaccagccugggcaacauggcaaaauc

SEQ ID NO: 545469 - RNA, 32 nt, Human
uuugagaccagccugggcaacauggcaagacc

SEQ ID NO: 545470 - RNA, 32 nt, Human
uuugagaccagccugggcaacauggcacaauu

SEQ ID NO: 545471 - RNA, 32 nt, Human
uuugagaccagccugggcaacauggcgaggcc

SEQ ID NO: 545472 - RNA, 32 nt, Human
uuugagaccagccugggcaacauggcuaaacc

SEQ ID NO: 545473 - RNA, 32 nt, Human
uuugagaccagccugggcaacauggugaaacc

SEQ ID NO: 545474 - RNA, 24 nt, Human
uuugagaccagccugggcaacgua

SEQ ID NO: 545475 - RNA, 32 nt, Human
uuugagaccagccugggcaacguagucagacc

SEQ ID NO: 545476 - RNA, 24 nt, Human
uuugagaccagccugggcaauaua

SEQ ID NO: 545477 - RNA, 32 nt, Human
uuugagaccagccugggcaauauagcaagacc

SEQ ID NO: 545478 - RNA, 32 nt, Human
uuugagaccagccugggcaauauagcgagacu

SEQ ID NO: 545479 - RNA, 32 nt, Human
uuugagaccagccugggcaauauagugagacc

SEQ ID NO: 545480 - RNA, 32 nt, Human
uuugagaccagccugggcaauaucgugagacc

SEQ ID NO: 545481 - RNA, 32 nt, Human
uuugagaccagccugggcaauauggugagacu

SEQ ID NO: 545482 - RNA, 24 nt, Human
uuugagaccagccugggcaccaug

SEQ ID NO: 545483 - RNA, 32 nt, Human
uuugagaccagccugggcaccauggugaaacc

SEQ ID NO: 545484 - RNA, 24 nt, Human
uuugagaccagccugggcagcaua

SEQ ID NO: 545485 - RNA, 32 nt, Human
uuugagaccagccugggcagcauagcaagaca

SEQ ID NO: 545486 - RNA, 32 nt, Human
uuugagaccagccugggcgauauagugaggcc

SEQ ID NO: 545487 - RNA, 24 nt, Human
uuugagaccagccuggggaacaua

SEQ ID NO: 545488 - RNA, 24 nt, Human
uuugagaccagccuggguaacaua

SEQ ID NO: 545489 - RNA, 32 nt, Human
uuugagaccagccuggguaacauagcaagacu

SEQ ID NO: 545490 - RNA, 32 nt, Human
uuugagaccagccuggguaacauagugagacc

SEQ ID NO: 545491 - RNA, 24 nt, Human
uuugagaccagccuggguaacaug

SEQ ID NO: 545492 - RNA, 32 nt, Human
uuugagaccagccuggguaacauggggagauc

SEQ ID NO: 545493 - RNA, 24 nt, Human
uuugagaccagccuggguaauaug

SEQ ID NO: 545494 - RNA, 32 nt, Human
uuugagaccagccuggguaauauggcaaaacc

SEQ ID NO: 545495 - RNA, 32 nt, Human
uuugagaccagccugguaaaauagugagaccu

SEQ ID NO: 545496 - RNA, 24 nt, Human
uuugagaccagccuggucaacaug

SEQ ID NO: 545497 - RNA, 32 nt, Human
uuugagaccagccuggucaacauggcgaaacc

SEQ ID NO: 545498 - RNA, 32 nt, Human
uuugagaccagccuggucaacaugguaaaacc

SEQ ID NO: 545499 - RNA, 32 nt, Human
uuugagaccagccuggucaacauugcaaaacc

SEQ ID NO: 545500 - RNA, 24 nt, Human
uuugagaccagccugguuaacaug

SEQ ID NO: 545501 - RNA, 32 nt, Human
uuugagaccagccugugcaacaucaugaaaca

SEQ ID NO: 545502 - RNA, 32 nt, Human
uuugagaccagccuugacaacauggugaaacc

SEQ ID NO: 545503 - RNA, 32 nt, Human
uuugagaccagccuugccaacacagugaaacc

SEQ ID NO: 545504 - RNA, 24 nt, Human
uuugagaccagcgugggcaauaua

SEQ ID NO: 545505 - RNA, 23 nt, Human
uuugagaccagcugggcaacaug

SEQ ID NO: 545506 - RNA, 32 nt, Human
uuugagaccagcugggcaacauggugaaaccc

SEQ ID NO: 545507 - RNA, 23 nt, Human
uuugagaccagcugggcaauaua

SEQ ID NO: 545508 - RNA, 32 nt, Human
uuugagaccagcuuagccaacauaguaagacc

SEQ ID NO: 545509 - RNA, 32 nt, Human
uuugagaccagcuugaccaacauggagaaacc

SEQ ID NO: 545510 - RNA, 24 nt, Human
uuugagaccagcuuggccaacaug

SEQ ID NO: 545511 - RNA, 32 nt, Human
uuugagaccagcuuggccaacauggugaaacc

SEQ ID NO: 545512 - RNA, 32 nt, Human
uuugagaccagcuuggccaacauggugaaauc

SEQ ID NO: 545513 - RNA, 22 nt, Human
uuugagaccagcuugggcaaca

SEQ ID NO: 545514 - RNA, 24 nt, Human
uuugagaccagcuugggcaacaua

SEQ ID NO: 545515 - RNA, 32 nt, Human
uuugagaccagcuugggcaacauagcaagacc

SEQ ID NO: 545516 - RNA, 32 nt, Human
uuugagaccagcuugggcaacauagugaaccc

SEQ ID NO: 545517 - RNA, 32 nt, Human
uuugagaccagcuugggcaacauagugagacc

SEQ ID NO: 545518 - RNA, 24 nt, Human
uuugagaccagcuugggcaacaug

SEQ ID NO: 545519 - RNA, 32 nt, Human
uuugagaccagcuugggcaacauggcaaaacc

SEQ ID NO: 545520 - RNA, 32 nt, Human
uuugagaccagcuugggcaacauggugaaacu

SEQ ID NO: 545521 - RNA, 24 nt, Human
uuugagaccagcuuggguaacaua

SEQ ID NO: 545522 - RNA, 24 nt, Human
uuugagaccagcuugugcaacaug

SEQ ID NO: 545523 - RNA, 32 nt, Human
uuugagaccaggcuggccaacauggcaaaacc

SEQ ID NO: 545524 - RNA, 32 nt, Human
uuugagaccaggcugggcaacauagugagacc

SEQ ID NO: 545525 - RNA, 32 nt, Human
uuugagaccaggcugggcaacauggugaaacc

SEQ ID NO: 545526 - RNA, 32 nt, Human
uuugagaccagucugaccaacauggagaaacc

SEQ ID NO: 545527 - RNA, 32 nt, Human
uuugagaccagucuggccaaaauaguggaacc

SEQ ID NO: 545528 - RNA, 32 nt, Human
uuugagaccagucuggccaacaaggcgaaacc

SEQ ID NO: 545529 - RNA, 24 nt, Human
uuugagaccagucuggccaacaug

SEQ ID NO: 545530 - RNA, 32 nt, Human
uuugagaccagucuggccaacauggcgaaacc

SEQ ID NO: 545531 - RNA, 32 nt, Human
uuugagaccagucuggccaacauggugaaacc

SEQ ID NO: 545532 - RNA, 32 nt, Human
uuugagaccaguguggccaacauggugaaacc

SEQ ID NO: 545533 - RNA, 24 nt, Human
uuugagaccaguuugggcaacaua

SEQ ID NO: 545534 - RNA, 32 nt, Human
uuugagaccaguuugggcaacauagugagauc

SEQ ID NO: 545535 - RNA, 32 nt, Human
uuugagaccauccugaguaacauggugaaacc

SEQ ID NO: 545536 - RNA, 32 nt, Human
uuugagaccauccuggccaacauggugaaacc

SEQ ID NO: 545537 - RNA, 32 nt, Human
uuugagaccauccuggcuaacauggugaaacc

SEQ ID NO: 545538 - RNA, 32 nt, Human
uuugagaccauccugggcaacauagggagauc

SEQ ID NO: 545539 - RNA, 24 nt, Human
uuugagaccauccugggcaacaug

SEQ ID NO: 545540 - RNA, 32 nt, Human
uuugagaccauccugggcaacauggcgaaacc

SEQ ID NO: 545541 - RNA, 24 nt, Human
uuugagaccggccuggccaacaug

SEQ ID NO: 545542 - RNA, 32 nt, Human
uuugagaccggccuggccaacauggugaaacc

SEQ ID NO: 545543 - RNA, 24 nt, Human
uuugagaccggccuggccagcgug

SEQ ID NO: 545544 - RNA, 32 nt, Human
uuugagaccggccuggccagcguggugaagcc

SEQ ID NO: 545545 - RNA, 32 nt, Human
uuugagaccggucggcacugugcagagaucag

SEQ ID NO: 545546 - RNA, 32 nt, Human
uuugagaccuaagaaagguuguguaagcagaa

SEQ ID NO: 545547 - RNA, 32 nt, Human
uuugagaccuagggcuggagugcaguugagcg

SEQ ID NO: 545548 - RNA, 32 nt, Human
uuugagaccugccuggccaacaugaugaaacc

SEQ ID NO: 545549 - RNA, 24 nt, Human
uuugagaccugccugggcaacaua

SEQ ID NO: 545550 - RNA, 32 nt, Human
uuugagacgaguuucgcucuguugcccaggcu

SEQ ID NO: 545551 - RNA, 24 nt, Human
uuugagacuagacugggcaacaua

SEQ ID NO: 545552 - RNA, 32 nt, Human
uuugagacuagacugggcaacauagcaagacc

SEQ ID NO: 545553 - RNA, 24 nt, Human
uuugagacuagccuaggcaacaca

SEQ ID NO: 545554 - RNA, 32 nt, Human
uuugagacuagccucacuaacauggugaaacc

SEQ ID NO: 545555 - RNA, 32 nt, Human
uuugagacuagccugaccaacauggagaaauc

SEQ ID NO: 545556 - RNA, 32 nt, Human
uuugagacuagccuggcaaacaugaugaaacc

SEQ ID NO: 545557 - RNA, 24 nt, Human
uuugagacuagccuggccaacaua

SEQ ID NO: 545558 - RNA, 32 nt, Human
uuugagacuagccuggccaacauggugagacc

SEQ ID NO: 545559 - RNA, 32 nt, Human
uuugagacuagccuggccaagauggugaaacc

SEQ ID NO: 545560 - RNA, 32 nt, Human
uuugagacuagccuggccaauauagugggacc

SEQ ID NO: 545561 - RNA, 32 nt, Human
uuugagacuagccuggccaauauggugaaacc

SEQ ID NO: 545562 - RNA, 24 nt, Human
uuugagacuagccuggccagcaug

SEQ ID NO: 545563 - RNA, 32 nt, Human
uuugagacuagccuggccagcauggugaaacc

SEQ ID NO: 545564 - RNA, 21 nt, Human
uuugagacuagccugggcaac

SEQ ID NO: 545565 - RNA, 24 nt, Human
uuugagacuagccugggcaacaua

SEQ ID NO: 545566 - RNA, 24 nt, Human
uuugagacuagccugggcaacaug

SEQ ID NO: 545567 - RNA, 32 nt, Human
uuugagacuagccugggcaacauggugaaacc

SEQ ID NO: 545568 - RNA, 32 nt, Human
uuugagacuagccugggcaacauggugagacc

SEQ ID NO: 545569 - RNA, 24 nt, Human
uuugagacuagccugggcaaccca

SEQ ID NO: 545570 - RNA, 24 nt, Human
uuugagacuagccugggcaauaug

SEQ ID NO: 545571 - RNA, 24 nt, Human
uuugagacuagccuggucagcaug

SEQ ID NO: 545572 - RNA, 24 nt, Human
uuugagacuagcuuggccaacaua

SEQ ID NO: 545573 - RNA, 32 nt, Human
uuugagacuagcuuggccaacauagugaaacc

SEQ ID NO: 545574 - RNA, 24 nt, Human
uuugagacuagucuggccaacaug

SEQ ID NO: 545575 - RNA, 32 nt, Human
uuugagacuagucuggccaacauggugaaaca

SEQ ID NO: 545576 - RNA, 32 nt, Human
uuugagacucacuuccucaucucccuguccuc

SEQ ID NO: 545577 - RNA, 32 nt, Human
uuugagacuccucagcaccccuccaguuuugc

SEQ ID NO: 545578 - RNA, 24 nt, Human
uuugagacuggccugggcagcaua

SEQ ID NO: 545579 - RNA, 32 nt, Human
uuugagacugggucucgcuuuguugcccaggc

SEQ ID NO: 545580 - RNA, 32 nt, Human
uuugagacuguucacucaaauagggcagagua

SEQ ID NO: 545581 - RNA, 32 nt, Human
uuugagagaaggagggaggaaaagguguccug

SEQ ID NO: 545582 - RNA, 32 nt, Human
uuugagagagucaagacucuuucuuaagggcc

SEQ ID NO: 545583 - RNA, 19 nt, Human
uuugagagagucucacucu

SEQ ID NO: 545584 - RNA, 32 nt, Human
uuugagagagugaaaggaagagacagauacuu

SEQ ID NO: 545585 - RNA, 32 nt, Human
uuugagagaucgcaugccccagccuuuccauc

SEQ ID NO: 545586 - RNA, 24 nt, Human
uuugagagcagccagggcaacaca

SEQ ID NO: 545587 - RNA, 32 nt, Human
uuugagagcagccuggccaacagaggugagca

SEQ ID NO: 545588 - RNA, 32 nt, Human
uuugagagcagccuggcuaacauggugaaacc

SEQ ID NO: 545589 - RNA, 32 nt, Human
uuugagaggccaaggagguggaucaauugagg

SEQ ID NO: 545590 - RNA, 32 nt, Human
uuugagaggcugcucuggaauaugucucaaug

SEQ ID NO: 545591 - RNA, 32 nt, Human
uuugagagggccugaaagcagaugccccagcc

SEQ ID NO: 545592 - RNA, 32 nt, Human
uuugagagugcuguaugcgguucccuuucaug

SEQ ID NO: 545593 - RNA, 24 nt, Human
uuugagaucagcccgggcaacaug

SEQ ID NO: 545594 - RNA, 32 nt, Human
uuugagaucagcccgggcaacauggugaaacc

SEQ ID NO: 545595 - RNA, 24 nt, Human
uuugagaucagccuaggcaacaug

SEQ ID NO: 545596 - RNA, 32 nt, Human
uuugagaucagccuaggcaacauggcaaaacc

SEQ ID NO: 545597 - RNA, 32 nt, Human
uuugagaucagccugcccaacauggugaaacc

SEQ ID NO: 545598 - RNA, 32 nt, Human
uuugagaucagccuggacaacagaccugagcc

SEQ ID NO: 545599 - RNA, 32 nt, Human
uuugagaucagccuggagaacaaagugagacc

SEQ ID NO: 545600 - RNA, 32 nt, Human
uuugagaucagccuggcaaacauggcgacacc

SEQ ID NO: 545601 - RNA, 32 nt, Human
uuugagaucagccuggccaacagacgugagcc

SEQ ID NO: 545602 - RNA, 32 nt, Human
uuugagaucagccuggccaacauagugaaacc

SEQ ID NO: 545603 - RNA, 24 nt, Human
uuugagaucagccuggccaacaug

SEQ ID NO: 545604 - RNA, 32 nt, Human
uuugagaucagccuggccaacauggugaaacc

SEQ ID NO: 545605 - RNA, 24 nt, Human
uuugagaucagccuggccaauaug

SEQ ID NO: 545606 - RNA, 32 nt, Human
uuugagaucagccuggccaauauggugaaacc

SEQ ID NO: 545607 - RNA, 24 nt, Human
uuugagaucagccuggccaaugug

SEQ ID NO: 545608 - RNA, 32 nt, Human
uuugagaucagccuggccaaugugguaaaacc

SEQ ID NO: 545609 - RNA, 32 nt, Human
uuugagaucagccuggccaauguggugaaacc

SEQ ID NO: 545610 - RNA, 24 nt, Human
uuugagaucagccuggccagcaug

SEQ ID NO: 545611 - RNA, 32 nt, Human
uuugagaucagccuggccagcauggcgaaacc

SEQ ID NO: 545612 - RNA, 24 nt, Human
uuugagaucagccugggaaacaua

SEQ ID NO: 545613 - RNA, 24 nt, Human
uuugagaucagccugggcaacaua

SEQ ID NO: 545614 - RNA, 24 nt, Human
uuugagaucagccugggcaacaug

SEQ ID NO: 545615 - RNA, 32 nt, Human
uuugagaucagccugggcaacauggugaaacc

SEQ ID NO: 545616 - RNA, 32 nt, Human
uuugagaucagccugggcaacaugguggaacc

SEQ ID NO: 545617 - RNA, 24 nt, Human
uuugagaucagccugggcaaugug

SEQ ID NO: 545618 - RNA, 32 nt, Human
uuugagaucagccuggucaacagagcgauauc

SEQ ID NO: 545619 - RNA, 21 nt, Human
uuugagaucaggaguucaaga

SEQ ID NO: 545620 - RNA, 32 nt, Human
uuugagaucaugcugaaggccaagcaggcccg

SEQ ID NO: 545621 - RNA, 32 nt, Human
uuugagauccuggccaagaccccguauggcca

SEQ ID NO: 545622 - RNA, 32 nt, Human
uuugagaucggccugggcaacauaguaagacc

SEQ ID NO: 545623 - RNA, 32 nt, Human
uuugagaugaaugcagacaucacaaaguaguu

SEQ ID NO: 545624 - RNA, 32 nt, Human
uuugagaugaguuucacucuuguugcccaggc

SEQ ID NO: 545625 - RNA, 32 nt, Human
uuugagaugcccgccccgccuccgagaccccg

SEQ ID NO: 545626 - RNA, 24 nt, Human
uuugagaugcgccugggcaacaua

SEQ ID NO: 545627 - RNA, 32 nt, Human
uuugagauggagucucgcuuuguugcccagac

SEQ ID NO: 545628 - RNA, 32 nt, Human
uuugagauggagucucgcuuuguugcccaggc

SEQ ID NO: 545629 - RNA, 32 nt, Human
uuugagauggagucucuugcucugucauccag

SEQ ID NO: 545630 - RNA, 32 nt, Human
uuugagauggagucuugcucuuuugccaggcu

SEQ ID NO: 545631 - RNA, 32 nt, Human
uuugagauggucuugcucuguugcccaggcug

SEQ ID NO: 545632 - RNA, 32 nt, Human
uuugagauuagccuggccaagauggugaaacc

SEQ ID NO: 545633 - RNA, 32 nt, Human
uuugagauuggaaacuucuugccuugaacaga

SEQ ID NO: 545634 - RNA, 32 nt, Human
uuugagcaacuaacuaaccacauuuuaggauc

SEQ ID NO: 545635 - RNA, 32 nt, Human
uuugagcaagggaagguagccuggaugagcug

SEQ ID NO: 545636 - RNA, 32 nt, Human
uuugagcacaauaugcagcacauaacuuuuca

SEQ ID NO: 545637 - RNA, 32 nt, Human
uuugagcacugcacuguuucucccucccuugg

SEQ ID NO: 545638 - RNA, 32 nt, Human
uuugagcagcuuuuggaaccacaguguuugcc

SEQ ID NO: 545639 - RNA, 32 nt, Human
uuugagcaggucucccuuuuacucuucccaac

SEQ ID NO: 545640 - RNA, 32 nt, Human
uuugagcaucaucucggcuuacauuuucucug

SEQ ID NO: 545641 - RNA, 32 nt, Human
uuugagccagccuggccaacauggugaaaccc

SEQ ID NO: 545642 - RNA, 32 nt, Human
uuugagcccagagguagaggcugcagugagcc

SEQ ID NO: 545643 - RNA, 32 nt, Human
uuugagcccagccuaggcaacauagcgagacc

SEQ ID NO: 545644 - RNA, 32 nt, Human
uuugagcccagcuugagcaacauagugaaauc

SEQ ID NO: 545645 - RNA, 32 nt, Human
uuugagcccaggaaucugagaccagccugagc

SEQ ID NO: 545646 - RNA, 32 nt, Human
uuugagcccaggaauuggaaagcagccuggcc

SEQ ID NO: 545647 - RNA, 32 nt, Human
uuugagcccaggaauuugaggcugcagcgagc

SEQ ID NO: 545648 - RNA, 32 nt, Human
uuugagcccaggaauuugaggcugcagugagc

SEQ ID NO: 545649 - RNA, 32 nt, Human
uuugagcccaggaggcagaauuugcagugagc

SEQ ID NO: 545650 - RNA, 32 nt, Human
uuugagcccaggaggcugaggcugcaaugacu

SEQ ID NO: 545651 - RNA, 32 nt, Human
uuugagcccaggaggucaaggcugcagugagc

SEQ ID NO: 545652 - RNA, 32 nt, Human
uuugagcccaggaggucgaggcugcagugggc

SEQ ID NO: 545653 - RNA, 32 nt, Human
uuugagcccaggagguugaggcugcagugagu

SEQ ID NO: 545654 - RNA, 32 nt, Human
uuugagcccaggaguucaaggcagcaaugagc

SEQ ID NO: 545655 - RNA, 32 nt, Human
uuugagcccaggaguucaaggccagccugggc

SEQ ID NO: 545656 - RNA, 32 nt, Human
uuugagcccaggaguuccagaccagccuaggc

SEQ ID NO: 545657 - RNA, 32 nt, Human
uuugagcccaggaguucgagaccaaccugggc

SEQ ID NO: 545658 - RNA, 32 nt, Human
uuugagcccaggaguugaagaccagccugggc

SEQ ID NO: 545659 - RNA, 32 nt, Human
uuugagcccaggaguuugagaccagcuggggc

SEQ ID NO: 545660 - RNA, 32 nt, Human
uuugagcccaggaguuugaggcugcagugagc

SEQ ID NO: 545661 - RNA, 32 nt, Human
uuugagcccgggaggucgaggcuacaguaagc

SEQ ID NO: 545662 - RNA, 32 nt, Human
uuugagcccugaaagucgagguugcagugagc

SEQ ID NO: 545663 - RNA, 32 nt, Human
uuugagcccuggagguugaggcugcagugagc

SEQ ID NO: 545664 - RNA, 32 nt, Human
uuugagccgccuggccuugcucaguuuauuuu

SEQ ID NO: 545665 - RNA, 32 nt, Human
uuugagccuaggaggucaaggcugcagugagc

SEQ ID NO: 545666 - RNA, 21 nt, Human
uuugagccuaggaguucgaga

SEQ ID NO: 545667 - RNA, 32 nt, Human
uuugagccugcaagauggagguugcagugagc

SEQ ID NO: 545668 - RNA, 32 nt, Human
uuugagccugcaucuucuugcaucuaaugaaa

SEQ ID NO: 545669 - RNA, 32 nt, Human
uuugagccugggagaucgaggcugcagugagc

SEQ ID NO: 545670 - RNA, 32 nt, Human
uuugagccugggaggcagagguugcagugagc

SEQ ID NO: 545671 - RNA, 32 nt, Human
uuugagccugggaggucgaggcuguagugagc

SEQ ID NO: 545672 - RNA, 23 nt, Human
uuugagcuacaggacaaaggcug

SEQ ID NO: 545673 - RNA, 32 nt, Human
uuugagcucagcccuggugggcagagagguag

SEQ ID NO: 545674 - RNA, 32 nt, Human
uuugagcucaggaggcagagguugcagugagc

SEQ ID NO: 545675 - RNA, 21 nt, Human
uuugagcucaggaguucaaga

SEQ ID NO: 545676 - RNA, 27 nt, Human
uuugagcucauuauaaccacacuccug

SEQ ID NO: 545677 - RNA, 32 nt, Human
uuugagcuccgcuguggcagagccuggagcug

SEQ ID NO: 545678 - RNA, 32 nt, Human
uuugagcuccugccuggauucccagcacuuug

SEQ ID NO: 545679 - RNA, 32 nt, Human
uuugagcucucuucccaauauuuccuuuuggu

SEQ ID NO: 545680 - RNA, 32 nt, Human
uuugagcucugcagccucucuccuggagugag

SEQ ID NO: 545681 - RNA, 32 nt, Human
uuugagcugcagcagcuuuaacucuuacccuu

SEQ ID NO: 545682 - RNA, 32 nt, Human
uuugagcugcuccuuccugugugugcucugga

SEQ ID NO: 545683 - RNA, 32 nt, Human
uuugagcugcuccuuccugugugugcucuggg

SEQ ID NO: 545684 - RNA, 20 nt, Human
uuugagcuggaaaggauguc

SEQ ID NO: 545685 - RNA, 32 nt, Human
uuugagcugugccauuuaugguacucuuugcc

SEQ ID NO: 545686 - RNA, 30 nt, Human
uuugagcuucauuucaggcuccuguggcug

SEQ ID NO: 545687 - RNA, 32 nt, Human
uuugagcuucuccucugcuccaacagacaccu

SEQ ID NO: 545688 - RNA, 32 nt, Human
uuugagcuuugaaagcagucacugugguguaa

SEQ ID NO: 545689 - RNA, 32 nt, Human
uuugaggaaauagaauucgccaaaccaaugca

SEQ ID NO: 545690 - RNA, 32 nt, Human
uuugaggaacagcagaaaaaugauguggaaaa

SEQ ID NO: 545691 - RNA, 32 nt, Human
uuugaggaaguccccaacacagugacucugac

SEQ ID NO: 545692 - RNA, 32 nt, Human
uuugaggacaaccauuccagacugcuuccaau

SEQ ID NO: 545693 - RNA, 32 nt, Human
uuugaggacagcuucaaucgcggugugaagaa

SEQ ID NO: 545694 - RNA, 32 nt, Human
uuugaggacuggugucacugaauggcucgagc

SEQ ID NO: 545695 - RNA, 32 nt, Human
uuugaggaggcaggagauuccgugggucccug

SEQ ID NO: 545696 - RNA, 32 nt, Human
uuugaggaugaaauucuccuccuucuucccuu

SEQ ID NO: 545697 - RNA, 32 nt, Human
uuugaggaugcuggggagagggggagggggcu

SEQ ID NO: 545698 - RNA, 32 nt, Human
uuugaggauuuaagaauuagggaaauaauuug

SEQ ID NO: 545699 - RNA, 31 nt, Human
uuugaggcaaugucucacuguuauccaggcu

SEQ ID NO: 545700 - RNA, 32 nt, Human
uuugaggcaggcgaggggcugggaguggguag

SEQ ID NO: 545701 - RNA, 32 nt, Human
uuugaggcauuucauuucuuuugcuaguucau

SEQ ID NO: 545702 - RNA, 24 nt, Human
uuugaggccagccagggcaacaca

SEQ ID NO: 545703 - RNA, 32 nt, Human
uuugaggccagccuggccaacauggcaaaacc

SEQ ID NO: 545704 - RNA, 32 nt, Human
uuugaggccagccuggccaacauggcgaaacc

SEQ ID NO: 545705 - RNA, 32 nt, Human
uuugaggccagccugggaaauauagugagacc

SEQ ID NO: 545706 - RNA, 24 nt, Human
uuugaggccagccugggcaacaua

SEQ ID NO: 545707 - RNA, 32 nt, Human
uuugaggccagccugggcaacauagagagacc

SEQ ID NO: 545708 - RNA, 32 nt, Human
uuugaggccagccugggcaacgugacgaaacc

SEQ ID NO: 545709 - RNA, 32 nt, Human
uuugaggccaggaguucaagaccagccugggc

SEQ ID NO: 545710 - RNA, 32 nt, Human
uuugaggccaggaguucaagaccagucuggcc

SEQ ID NO: 545711 - RNA, 32 nt, Human
uuugaggccaggaguucgauaccagccuggcc

SEQ ID NO: 545712 - RNA, 32 nt, Human
uuugaggccaggaguucuagaccagccuggcc

SEQ ID NO: 545713 - RNA, 32 nt, Human
uuugaggccaggaguuugagaccugccugggc

SEQ ID NO: 545714 - RNA, 32 nt, Human
uuugaggccagucuggccaaugugaugaaacc

SEQ ID NO: 545715 - RNA, 32 nt, Human
uuugaggccauuuugagccuuacucuuaaguu

SEQ ID NO: 545716 - RNA, 32 nt, Human
uuugaggccuugcccugcuccauccagagcaa

SEQ ID NO: 545717 - RNA, 32 nt, Human
uuugaggcggcacgcagccuagacgacagacu

SEQ ID NO: 545718 - RNA, 32 nt, Human
uuugaggcucagagacagagcagaagacagaa

SEQ ID NO: 545719 - RNA, 20 nt, Human
uuugaggcuggaugcagugg

SEQ ID NO: 545720 - RNA, 32 nt, Human
uuugagggaaaucauaaccaaaaguuuaaagg

SEQ ID NO: 545721 - RNA, 32 nt, Human
uuugagggaggcagaagucugcaguugaagaa

SEQ ID NO: 545722 - RNA, 32 nt, Human
uuugagggcagggggaguuuuauucuacaccc

SEQ ID NO: 545723 - RNA, 32 nt, Human
uuugagggcauccuauaaacacccaacuguuc

SEQ ID NO: 545724 - RNA, 32 nt, Human
uuugagggcuguacuagguuuaucucauuuaa

SEQ ID NO: 545725 - RNA, 32 nt, Human
uuugaggggauguggcacugagcccacaggag

SEQ ID NO: 545726 - RNA, 32 nt, Human
uuugaggggucugaagacugaaagagucgaau

SEQ ID NO: 545727 - RNA, 23 nt, Human
uuugagggugagggacagcacag

SEQ ID NO: 545728 - RNA, 32 nt, Human
uuugagggugagugccuccagcagaaacacag

SEQ ID NO: 545729 - RNA, 32 nt, Human
uuugaggucacugagguaggaagaccugucua

SEQ ID NO: 545730 - RNA, 32 nt, Human
uuugagguggaggauuucacaguuucuuuauu

SEQ ID NO: 545731 - RNA, 32 nt, Human
uuugaggugggaggggccauggagacugcagg

SEQ ID NO: 545732 - RNA, 32 nt, Human
uuugagguuggccuggacaacauggcgagacc

SEQ ID NO: 545733 - RNA, 32 nt, Human
uuugaguaacaaauaaauaagaucagacucug

SEQ ID NO: 545734 - RNA, 32 nt, Human
uuugaguaccuccaggcugaaggacuguugua

SEQ ID NO: 545735 - RNA, 32 nt, Human
uuugaguagaaaagggccuggaaagaggggag

SEQ ID NO: 545736 - RNA, 32 nt, Human
uuugaguagaaauggcuggacauacuucaaac

SEQ ID NO: 545737 - RNA, 32 nt, Human
uuugaguagagaaauuaugugugucauguggu

SEQ ID NO: 545738 - RNA, 32 nt, Human
uuugaguauccagagauuugugugugaaauga

SEQ ID NO: 545739 - RNA, 32 nt, Human
uuugagucacaucuuuuuagaaaaucaugaga

SEQ ID NO: 545740 - RNA, 32 nt, Human
uuugagucaccccagcccaggagucaaaaaua

SEQ ID NO: 545741 - RNA, 32 nt, Human
uuugagucacugggaucuuccuggugagaggu

SEQ ID NO: 545742 - RNA, 32 nt, Human
uuugagucauuuccacaucuugcgaguccuuc

SEQ ID NO: 545743 - RNA, 32 nt, Human
uuugagucccccaaacugccugaagacuuaag

SEQ ID NO: 545744 - RNA, 32 nt, Human
uuugaguccucauccauggagugcuguguuug

SEQ ID NO: 545745 - RNA, 32 nt, Human
uuugaguccuugcuucuguuugcucacaguaa

SEQ ID NO: 545746 - RNA, 32 nt, Human
uuugagucugacaaaaucagaguuaggaucuu

SEQ ID NO: 545747 - RNA, 32 nt, Human
uuugagucuuucuauguugucuagacggaggg

SEQ ID NO: 545748 - RNA, 32 nt, Human
uuugagugaaccugaccugauagccucaggau

SEQ ID NO: 545749 - RNA, 32 nt, Human
uuugagugacucuggagccaucuuugaagccc

SEQ ID NO: 545750 - RNA, 32 nt, Human
uuugagugcaguugguacaguacuuugguguc

SEQ ID NO: 545751 - RNA, 32 nt, Human
uuugagugcugaagacuucucccaucuccacg

SEQ ID NO: 545752 - RNA, 32 nt, Human
uuugagugcugucucuggacaucuucagccca

SEQ ID NO: 545753 - RNA, 32 nt, Human
uuugaguguagggagugugggagcagccuugg

SEQ ID NO: 545754 - RNA, 32 nt, Human
uuugagugugcagaguacauggggaaggggcu

SEQ ID NO: 545755 - RNA, 32 nt, Human
uuugaguguuagagaaaggagugaaggaggca

SEQ ID NO: 545756 - RNA, 24 nt, Human
uuugaguguuucccuuuuuugcca

SEQ ID NO: 545757 - RNA, 32 nt, Human
uuugaguucagccuggguagcauaugggaacu

SEQ ID NO: 545758 - RNA, 32 nt, Human
uuugaguucaggaagugugacaaggauuugga

SEQ ID NO: 545759 - RNA, 21 nt, Human
uuugaguucaggaguucaaga

SEQ ID NO: 545760 - RNA, 32 nt, Human
uuugaguucccugcaucugccaccguaguuuc

SEQ ID NO: 545761 - RNA, 32 nt, Human
uuugaguucugaggagaaaacuaacucuuuuc

SEQ ID NO: 545762 - RNA, 32 nt, Human
uuugaguucuggguauccucccuuucuguaac

SEQ ID NO: 545763 - RNA, 32 nt, Human
uuugaguugcccacauacugcaguuauucugu

SEQ ID NO: 545764 - RNA, 32 nt, Human
uuugaguugggaucuugugcucugucacccag

SEQ ID NO: 545765 - RNA, 32 nt, Human
uuugaguugucccgccuuucuggaccaaacca

SEQ ID NO: 545766 - RNA, 32 nt, Human
uuugaguuucaucaaaugaauguccuucacau

SEQ ID NO: 545767 - RNA, 32 nt, Human
uuugaguuucucucacauuacuguauauacuu

SEQ ID NO: 545768 - RNA, 32 nt, Human
uuugaguuuggguucuccccagccccuuggcc

SEQ ID NO: 545769 - RNA, 32 nt, Human
uuugaguuuuagaauuagucauucuuuagagc

SEQ ID NO: 545770 - RNA, 32 nt, Human
uuugauaaccucucuccauccugggccugaug

SEQ ID NO: 545771 - RNA, 32 nt, Human
uuugauaagacaggguauugccguguuggcca

SEQ ID NO: 545772 - RNA, 32 nt, Human
uuugauaagcugcugaagaagcucacaaguca

SEQ ID NO: 545773 - RNA, 32 nt, Human
uuugauaagcuuggggacaacaucccaauaga

SEQ ID NO: 545774 - RNA, 32 nt, Human
uuugauaauaaagaugacauugccaguuuugu

SEQ ID NO: 545775 - RNA, 32 nt, Human
uuugauaaugaacagugagagauuuuuaaaua

SEQ ID NO: 545776 - RNA, 32 nt, Human
uuugauacaugcuuuuauuuuccuucauuuuu

SEQ ID NO: 545777 - RNA, 32 nt, Human
uuugauaccagccugaccaacauggagaaacc

SEQ ID NO: 545778 - RNA, 32 nt, Human
uuugauaccagccuggccaacauggugaaacc

SEQ ID NO: 545779 - RNA, 20 nt, Human
uuugauaccauucaagugaa

SEQ ID NO: 545780 - RNA, 32 nt, Human
uuugauacuacugguugcuaauguucuggcau

SEQ ID NO: 545781 - RNA, 32 nt, Human
uuugauacuacuguagaacacuauuuuuaaua

SEQ ID NO: 545782 - RNA, 32 nt, Human
uuugauacuauuuggcuuaaucaucuucacuu

SEQ ID NO: 545783 - RNA, 32 nt, Human
uuugauacucucuaccuccuccagaaacacga

SEQ ID NO: 545784 - RNA, 32 nt, Human
uuugauagaaucuugcucugucgcccaggcug

SEQ ID NO: 545785 - RNA, 32 nt, Human
uuugauagcacgcuauucuuuccuucauggca

SEQ ID NO: 545786 - RNA, 32 nt, Human
uuugauagccaucuauucaucuggaucauggg

SEQ ID NO: 545787 - RNA, 32 nt, Human
uuugauaucucucaauagaauguugcaguuuu

SEQ ID NO: 545788 - RNA, 32 nt, Human
uuugauaugacaacaaccccuccaucacaagu

SEQ ID NO: 545789 - RNA, 32 nt, Human
uuugauauggcagaccuaggaaacaaauacag

SEQ ID NO: 545790 - RNA, 25 nt, Human
uuugauaugucugcaugcagcacag

SEQ ID NO: 545791 - RNA, 32 nt, Human
uuugauaugucuucauuuaauuuugugaaguc

SEQ ID NO: 545792 - RNA, 32 nt, Human
uuugauauuucucaaggcccuagucucugcug

SEQ ID NO: 545793 - RNA, 22 nt, Human
uuugaucaaccuuuaguuggaa

SEQ ID NO: 545794 - RNA, 32 nt, Human
uuugaucacaccacugcacuccagccugggca

SEQ ID NO: 545795 - RNA, 32 nt, Human
uuugaucacagaacuucuagaauaacccagau

SEQ ID NO: 545796 - RNA, 32 nt, Human
uuugaucacuguggucacagaccugguacugg

SEQ ID NO: 545797 - RNA, 32 nt, Human
uuugaucagaucagugucagaagauuacuucu

SEQ ID NO: 545798 - RNA, 32 nt, Human
uuugauccaagcagguuggggaacauauuggu

SEQ ID NO: 545799 - RNA, 32 nt, Human
uuugauccaagugcccacaguucugaugaaug

SEQ ID NO: 545800 - RNA, 32 nt, Human
uuugauccuccgaaucuggagauguuguagag

SEQ ID NO: 545801 - RNA, 32 nt, Human
uuugauccuccuuuacauagcacagcuauaua

SEQ ID NO: 545802 - RNA, 32 nt, Human
uuugaucugucucccuuuaguuuugccggauu

SEQ ID NO: 545803 - RNA, 32 nt, Human
uuugaucuguuuugaaaaagauaaagagccuc

SEQ ID NO: 545804 - RNA, 32 nt, Human
uuugaucuuccucugcuaaauugauguugaug

SEQ ID NO: 545805 - RNA, 32 nt, Human
uuugaucuucuuuuucuuuucucccccucuuu

SEQ ID NO: 545806 - RNA, 29 nt, Human
uuugaugacagaaaacaucacacagaaag

SEQ ID NO: 545807 - RNA, 32 nt, Human
uuugaugaguuucuuguaagguuaccguuucu

SEQ ID NO: 545808 - RNA, 32 nt, Human
uuugaugauacagauuuaagaauaccugagac

SEQ ID NO: 545809 - RNA, 32 nt, Human
uuugaugaugucuccaucuacuuuuccacucc

SEQ ID NO: 545810 - RNA, 32 nt, Human
uuugaugcaacuuauuuguaagaaggauuuuu

SEQ ID NO: 545811 - RNA, 32 nt, Human
uuugaugcaccuuagagaacaguaggagcagc

SEQ ID NO: 545812 - RNA, 32 nt, Human
uuugaugccaacuuuauguguaaagaagcuaa

SEQ ID NO: 545813 - RNA, 32 nt, Human
uuugaugccacugguuugucuccugggcccuc

SEQ ID NO: 545814 - RNA, 32 nt, Human
uuugaugccaggacacgcuuuggaggcgauuu

SEQ ID NO: 545815 - RNA, 32 nt, Human
uuugaugcucuucucaaggugcacugacugag

SEQ ID NO: 545816 - RNA, 32 nt, Human
uuugauggagagaaagcuguaggauccauaaa

SEQ ID NO: 545817 - RNA, 32 nt, Human
uuugauggagcgugucaguauugugugacgcu

SEQ ID NO: 545818 - RNA, 32 nt, Human
uuugauggcuggggccagucucuugucacuuu

SEQ ID NO: 545819 - RNA, 32 nt, Human
uuugauggcuguaacuggaagcaacacuccug

SEQ ID NO: 545820 - RNA, 32 nt, Human
uuugaugggaagaaugaggaccugguugauaa

SEQ ID NO: 545821 - RNA, 19 nt, Human
uuugaugggauaaggaagc

SEQ ID NO: 545822 - RNA, 29 nt, Human
uuugaugggggccuucuucuccccauguc

SEQ ID NO: 545823 - RNA, 32 nt, Human
uuugauggggucuucauuguccagaaauaccu

SEQ ID NO: 545824 - RNA, 32 nt, Human
uuugauggggucuugcuaugucucccaggcug

SEQ ID NO: 545825 - RNA, 32 nt, Human
uuugaugggucugacuauaugcacacaccuuu

SEQ ID NO: 545826 - RNA, 32 nt, Human
uuugaugguuucuauucugacugacaucaauu

SEQ ID NO: 545827 - RNA, 32 nt, Human
uuugaugguuugaaugcuugcuuucuuguagu

SEQ ID NO: 545828 - RNA, 32 nt, Human
uuugaugucacugacugucuacauguauuuau

SEQ ID NO: 545829 - RNA, 32 nt, Human
uuugaugucaugaggacaggauguuugugucu

SEQ ID NO: 545830 - RNA, 32 nt, Human
uuugaugucucaucuucauuguuuucacucuu

SEQ ID NO: 545831 - RNA, 23 nt, Human
uuugaugugaaauuugggaacag

SEQ ID NO: 545832 - RNA, 32 nt, Human
uuugauguggaaucacagcugcagugauauau

SEQ ID NO: 545833 - RNA, 32 nt, Human
uuugauguuaaaugacauguauacaaauucuu

SEQ ID NO: 545834 - RNA, 32 nt, Human
uuugauguuaucuagccuagaaaugacacaga

SEQ ID NO: 545835 - RNA, 32 nt, Human
uuugauguuaucuuuggaugugcaaucugaaa

SEQ ID NO: 545836 - RNA, 21 nt, Human
uuugauguucagagcacacag

SEQ ID NO: 545837 - RNA, 32 nt, Human
uuugauguucugagguuugcuuugguuuuucc

SEQ ID NO: 545838 - RNA, 32 nt, Human
uuugauguugaaugaacuaguaagucacagua

SEQ ID NO: 545839 - RNA, 32 nt, Human
uuugauguuguagacuaggcuccugaguuaag

SEQ ID NO: 545840 - RNA, 32 nt, Human
uuugauguuuaugaggaugauugcugguuucc

SEQ ID NO: 545841 - RNA, 32 nt, Human
uuugauguuuuuaaaauuuugucuucucugug

SEQ ID NO: 545842 - RNA, 32 nt, Human
uuugauuaagagaagucuugggaagauaggua

SEQ ID NO: 545843 - RNA, 32 nt, Human
uuugauuacacaaaagccaauuuuaccuuccc

SEQ ID NO: 545844 - RNA, 32 nt, Human
uuugauuacaccccugcacuccagccugggcg

SEQ ID NO: 545845 - RNA, 32 nt, Human
uuugauuaccaccaccaucugaccuggucuua

SEQ ID NO: 545846 - RNA, 32 nt, Human
uuugauuacgcauucaccuguucauucauuca

SEQ ID NO: 545847 - RNA, 32 nt, Human
uuugauuaggaaacaguuuggccaaaguacca

SEQ ID NO: 545848 - RNA, 32 nt, Human
uuugauucauagguaggagggcuuagauuuua

SEQ ID NO: 545849 - RNA, 32 nt, Human
uuugauucauuugaguuaacagugguguuagu

SEQ ID NO: 545850 - RNA, 32 nt, Human
uuugauuccauuccucaagauaauuuuagagu

SEQ ID NO: 545851 - RNA, 32 nt, Human
uuugauuccucccagguuguucccugccuggu

SEQ ID NO: 545852 - RNA, 32 nt, Human
uuugauucuaugguucccucaguauuacaucu

SEQ ID NO: 545853 - RNA, 32 nt, Human
uuugauucuccaguauuccuguuuccauccag

SEQ ID NO: 545854 - RNA, 32 nt, Human
uuugauucuguccucuggaaaaugggcugcuu

SEQ ID NO: 545855 - RNA, 32 nt, Human
uuugauucuuucuauguugcccaggcugaucu

SEQ ID NO: 545856 - RNA, 32 nt, Human
uuugauugaacacaggcuugacagaaucuucu

SEQ ID NO: 545857 - RNA, 32 nt, Human
uuugauugccugcucuuuccagacacaacugc

SEQ ID NO: 545858 - RNA, 32 nt, Human
uuugauugcuggcaucuugccaccccagguau

SEQ ID NO: 545859 - RNA, 32 nt, Human
uuugauuguaauugcguuaaaucuuuugagag

SEQ ID NO: 545860 - RNA, 32 nt, Human
uuugauuguguaagggucuaaccacaacaaaa

SEQ ID NO: 545861 - RNA, 32 nt, Human
uuugauuuacagggaccuugcugcaguaaaua

SEQ ID NO: 545862 - RNA, 32 nt, Human
uuugauuucagccugcccuugccagugccugg

SEQ ID NO: 545863 - RNA, 32 nt, Human
uuugauuucccaaagagaacauuugcauuugu

SEQ ID NO: 545864 - RNA, 32 nt, Human
uuugauuucccuaggauggaagaguauaggug

SEQ ID NO: 545865 - RNA, 32 nt, Human
uuugauuuccucuucucucccuucaagcccca

SEQ ID NO: 545866 - RNA, 32 nt, Human
uuugauuucucauuugcugccagugucacauu

SEQ ID NO: 545867 - RNA, 32 nt, Human
uuugauuucugaccuuguaccucucuuugaug

SEQ ID NO: 545868 - RNA, 32 nt, Human
uuugauuucuuuaacagaggugagacuauuca

SEQ ID NO: 545869 - RNA, 32 nt, Human
uuugauuugccucccuaaccuuuucuagggcu

SEQ ID NO: 545870 - RNA, 32 nt, Human
uuugauuugccuggagucuuuuggaggcauga

SEQ ID NO: 545871 - RNA, 32 nt, Human
uuugauuuugcacugagccaaaggucuagcau

SEQ ID NO: 545872 - RNA, 32 nt, Human
uuugauuuugcauuuugcacuuccucccagga

SEQ ID NO: 545873 - RNA, 32 nt, Human
uuugcaaaacaugcucuucuaauuugaucaaa

SEQ ID NO: 545874 - RNA, 32 nt, Human
uuugcaaaaugucaauucucuaaaaauguguc

SEQ ID NO: 545875 - RNA, 32 nt, Human
uuugcaaacacguggauggaacuggggucaug

SEQ ID NO: 545876 - RNA, 32 nt, Human
uuugcaaacagaaacuauagcagacacauaaa

SEQ ID NO: 545877 - RNA, 32 nt, Human
uuugcaaaccugcaccuugcacuuuuggguuc

SEQ ID NO: 545878 - RNA, 32 nt, Human
uuugcaaacuauauaaagacauaugcaguaaa

SEQ ID NO: 545879 - RNA, 32 nt, Human
uuugcaaagagcucaauugcucugagcucagc

SEQ ID NO: 545880 - RNA, 32 nt, Human
uuugcaaagcccuugcauuguaugacaugagg

SEQ ID NO: 545881 - RNA, 32 nt, Human
uuugcaaagggaaauuaaagaaagaauguugc

SEQ ID NO: 545882 - RNA, 32 nt, Human
uuugcaaagucacagaccauugccucagaagg

SEQ ID NO: 545883 - RNA, 22 nt, Human
uuugcaaauaggaaacccccuu

SEQ ID NO: 545884 - RNA, 32 nt, Human
uuugcaaaucagaggauagaaaauguuaugcu

SEQ ID NO: 545885 - RNA, 32 nt, Human
uuugcaaaucuuaagacuaacaaauccuugaa

SEQ ID NO: 545886 - RNA, 31 nt, Human
uuugcaaaucuuuucuguucuguagguuguu

SEQ ID NO: 545887 - RNA, 32 nt, Human
uuugcaaauuaguaucacaacugcuaaguaga

SEQ ID NO: 545888 - RNA, 32 nt, Human
uuugcaaauuccaggggaucaagacuauugau

SEQ ID NO: 545889 - RNA, 20 nt, Human
uuugcaacaagaccauuuua

SEQ ID NO: 545890 - RNA, 32 nt, Human
uuugcaacacaaaagcauaugcagccccuaaa

SEQ ID NO: 545891 - RNA, 32 nt, Human
uuugcaacaucucauuucuuccuuuugcuguu

SEQ ID NO: 545892 - RNA, 32 nt, Human
uuugcaaccacaccuccgccucccuuggaaga

SEQ ID NO: 545893 - RNA, 32 nt, Human
uuugcaaccagccugagcaaaauauugagacu

SEQ ID NO: 545894 - RNA, 32 nt, Human
uuugcaaccaucagaauucagaaucuauagug

SEQ ID NO: 545895 - RNA, 20 nt, Human
uuugcaacuauuuccaccuc

SEQ ID NO: 545896 - RNA, 32 nt, Human
uuugcaacucacugauucucuacaugcucuuu

SEQ ID NO: 545897 - RNA, 32 nt, Human
uuugcaacugaaauuuauuuugccaauguuuu

SEQ ID NO: 545898 - RNA, 32 nt, Human
uuugcaacugcacuccagccugggcuacagag

SEQ ID NO: 545899 - RNA, 32 nt, Human
uuugcaagaauaagcaaagcccauggaauuua

SEQ ID NO: 545900 - RNA, 32 nt, Human
uuugcaagagcaccucuucagauauggcaccu

SEQ ID NO: 545901 - RNA, 32 nt, Human
uuugcaaggauacggcuucaguauuacuaauu

SEQ ID NO: 545902 - RNA, 32 nt, Human
uuugcaaguuuccugugaaaacaucaguuucc

SEQ ID NO: 545903 - RNA, 32 nt, Human
uuugcaaucuacagcuaguagagacuuugagg

SEQ ID NO: 545904 - RNA, 31 nt, Human
uuugcaaugucaggcuuugaaaacuuaaaca

SEQ ID NO: 545905 - RNA, 32 nt, Human
uuugcaauuauaaucacuccuacuuucuaagc

SEQ ID NO: 545906 - RNA, 26 nt, Human
uuugcaauugucacaacuaggagagg

SEQ ID NO: 545907 - RNA, 32 nt, Human
uuugcaauuuggaauuugugugaguugauuua

SEQ ID NO: 545908 - RNA, 32 nt, Human
uuugcacaaagaaaaugcuauuuuuggagcca

SEQ ID NO: 545909 - RNA, 32 nt, Human
uuugcacaaccuccaagccucugcagcagaca

SEQ ID NO: 545910 - RNA, 32 nt, Human
uuugcacaagggcaugaccuuuuuacuagacc

SEQ ID NO: 545911 - RNA, 32 nt, Human
uuugcacacaacauucaaaacacuucauauug

SEQ ID NO: 545912 - RNA, 32 nt, Human
uuugcacacagccccaggcuccacacagaaau

SEQ ID NO: 545913 - RNA, 32 nt, Human
uuugcacacaucaaaaguauugugauauuuuc

SEQ ID NO: 545914 - RNA, 25 nt, Human
uuugcacacccgcucuccggcccgc

SEQ ID NO: 545915 - RNA, 32 nt, Human
uuugcacacgcugaugaacgugcucaagaagg

SEQ ID NO: 545916 - RNA, 32 nt, Human
uuugcacagaacuucauuuugaaaguguuuuu

SEQ ID NO: 545917 - RNA, 32 nt, Human
uuugcacagacaccucuaccuucagcacuaug

SEQ ID NO: 545918 - RNA, 31 nt, Human
uuugcacagcccucugggcgcacugugugcc

SEQ ID NO: 545919 - RNA, 32 nt, Human
uuugcacagcucaucuggccagaagagcugag

SEQ ID NO: 545920 - RNA, 32 nt, Human
uuugcacaggcugagugcaaugccgugaucuc

SEQ ID NO: 545921 - RNA, 32 nt, Human
uuugcacaucuacauccagaacagugagaacg

SEQ ID NO: 545922 - RNA, 32 nt, Human
uuugcacaugcccuuuuucaguccaauugaac

SEQ ID NO: 545923 - RNA, 32 nt, Human
uuugcacauggugacuuucccacugugccaug

SEQ ID NO: 545924 - RNA, 32 nt, Human
uuugcacauuuccaccaugguggcuggugugg

SEQ ID NO: 545925 - RNA, 32 nt, Human
uuugcaccaucuuuuauagccacauucuccau

SEQ ID NO: 545926 - RNA, 32 nt, Human
uuugcaccaugaguuugugaaaaaucuggauu

SEQ ID NO: 545927 - RNA, 32 nt, Human
uuugcacccacugcauuugcagccuugagguc

SEQ ID NO: 545928 - RNA, 32 nt, Human
uuugcaccgcuguacuccagccugggcaacag

SEQ ID NO: 545929 - RNA, 22 nt, Human
uuugcaccuucucagugcugua

SEQ ID NO: 545930 - RNA, 32 nt, Human
uuugcacgugcuguuugcugugcguggaaugc

SEQ ID NO: 545931 - RNA, 32 nt, Human
uuugcacuaccagucucccaaauagaaaauca

SEQ ID NO: 545932 - RNA, 32 nt, Human
uuugcacuaccuguuaucaguagugccuuuac

SEQ ID NO: 545933 - RNA, 32 nt, Human
uuugcacuccugugagaaucuaaugccucugc

SEQ ID NO: 545934 - RNA, 32 nt, Human
uuugcacucuucuggccugccccauguuacua

SEQ ID NO: 545935 - RNA, 32 nt, Human
uuugcacugcaacaucaugccucugaagaaaa

SEQ ID NO: 545936 - RNA, 32 nt, Human
uuugcacuggcuucuuguuuaggcugaauccu

SEQ ID NO: 545937 - RNA, 32 nt, Human
uuugcacuuacugcugcguucccuucaucuaa

SEQ ID NO: 545938 - RNA, 32 nt, Human
uuugcacuuagguaccaggugucaggaaacag

SEQ ID NO: 545939 - RNA, 32 nt, Human
uuugcacuucauauuuguuuacuuucuccuaa

SEQ ID NO: 545940 - RNA, 32 nt, Human
uuugcagaaaugaucauuugcacagaaugggu

SEQ ID NO: 545941 - RNA, 32 nt, Human
uuugcagaacuguuguagaaagcugccuuaua

SEQ ID NO: 545942 - RNA, 32 nt, Human
uuugcagacaagggcuugggauggacccucag

SEQ ID NO: 545943 - RNA, 32 nt, Human
uuugcagacacagggucucaccauguugccca

SEQ ID NO: 545944 - RNA, 32 nt, Human
uuugcagaccgaacagugaaaagcuuucagug

SEQ ID NO: 545945 - RNA, 22 nt, Human
uuugcagacuacgucuccugcc

SEQ ID NO: 545946 - RNA, 32 nt, Human
uuugcagacuagaaaggugagccccagaaggg

SEQ ID NO: 545947 - RNA, 32 nt, Human
uuugcagacuugggguugggagaacaucuuaa

SEQ ID NO: 545948 - RNA, 32 nt, Human
uuugcagagaccacugcacuccagccugggca

SEQ ID NO: 545949 - RNA, 32 nt, Human
uuugcagaggcguaggaaugaggcuggacaga

SEQ ID NO: 545950 - RNA, 32 nt, Human
uuugcagaguccaugaaacaggaacacuccca

SEQ ID NO: 545951 - RNA, 21 nt, Human
uuugcagaucuugcuccuuuc

SEQ ID NO: 545952 - RNA, 32 nt, Human
uuugcagauggaccuuucccuaugggcacuau

SEQ ID NO: 545953 - RNA, 32 nt, Human
uuugcagauguaggugguuccagcuuuucuuu

SEQ ID NO: 545954 - RNA, 32 nt, Human
uuugcagcauugcacuccagccugggugacag

SEQ ID NO: 545955 - RNA, 32 nt, Human
uuugcagccaguucccaccaauaugccccaga

SEQ ID NO: 545956 - RNA, 32 nt, Human
uuugcagcccacuccccaucuuccugcuauaa

SEQ ID NO: 545957 - RNA, 32 nt, Human
uuugcagcccaggcuggagugcaguggcacca

SEQ ID NO: 545958 - RNA, 32 nt, Human
uuugcagcccaguccccgccuuuucagaggga

SEQ ID NO: 545959 - RNA, 18 nt, Human
uuugcagccccugcccca

SEQ ID NO: 545960 - RNA, 32 nt, Human
uuugcagcccugggugggggcaugagauagac

SEQ ID NO: 545961 - RNA, 32 nt, Human
uuugcagccuccucuucugucaccaacuggga

SEQ ID NO: 545962 - RNA, 32 nt, Human
uuugcagcuagggguggccgugucacagucug

SEQ ID NO: 545963 - RNA, 32 nt, Human
uuugcagcucugacuucugcucccaguaaccc

SEQ ID NO: 545964 - RNA, 32 nt, Human
uuugcagcuggggacauggaggcuagaagcau

SEQ ID NO: 545965 - RNA, 32 nt, Human
uuugcaggaaggccugaacaugugcacccucc

SEQ ID NO: 545966 - RNA, 32 nt, Human
uuugcaggacaguguucucaggagcugggccu

SEQ ID NO: 545967 - RNA, 32 nt, Human
uuugcaggacuggcccacacaguccccugcag

SEQ ID NO: 545968 - RNA, 32 nt, Human
uuugcaggagggccaggaagggguuccggcca

SEQ ID NO: 545969 - RNA, 32 nt, Human
uuugcaggauccgucugugcacaugccucugu

SEQ ID NO: 545970 - RNA, 25 nt, Human
uuugcaggccucaccucugccuucu

SEQ ID NO: 545971 - RNA, 32 nt, Human
uuugcaggcgggggucugagaucagggugucg

SEQ ID NO: 545972 - RNA, 24 nt, Human
uuugcaggcucugcugugucuuuc

SEQ ID NO: 545973 - RNA, 32 nt, Human
uuugcagggaaauugacugcaggugauagugu

SEQ ID NO: 545974 - RNA, 20 nt, Human
uuugcagggaagagggcccc

SEQ ID NO: 545975 - RNA, 32 nt, Human
uuugcagggcauagggcgauggggaagccaua

SEQ ID NO: 545976 - RNA, 32 nt, Human
uuugcaggggguggggguuggggaagacagca

SEQ ID NO: 545977 - RNA, 32 nt, Human
uuugcaggguuccuuucuguggggguaccugu

SEQ ID NO: 545978 - RNA, 22 nt, Human
uuugcaggucagccuccucucc

SEQ ID NO: 545979 - RNA, 32 nt, Human
uuugcaggucuuuauuucuucuguaaaacagu

SEQ ID NO: 545980 - RNA, 32 nt, Human
uuugcaggugcucacacuacacuuacaacuug

SEQ ID NO: 545981 - RNA, 32 nt, Human
uuugcagguguaacagauaaccagagaagcug

SEQ ID NO: 545982 - RNA, 32 nt, Human
uuugcaggugugagucaaugugggaacccagg

SEQ ID NO: 545983 - RNA, 32 nt, Human
uuugcaguccuccccuacccacucccugcccu

SEQ ID NO: 545984 - RNA, 32 nt, Human
uuugcaguccuccuguggcucaucccucggac

SEQ ID NO: 545985 - RNA, 32 nt, Human
uuugcagucucaggacgggcgcuuuggagccg

SEQ ID NO: 545986 - RNA, 32 nt, Human
uuugcagucucccccaguguggugugacuggc

SEQ ID NO: 545987 - RNA, 32 nt, Human
uuugcagucuccucucagucauucaucaaugu

SEQ ID NO: 545988 - RNA, 32 nt, Human
uuugcagucuguuucaagauuucugcauccac

SEQ ID NO: 545989 - RNA, 32 nt, Human
uuugcagucuuuucaaugcagccacauuuuua

SEQ ID NO: 545990 - RNA, 32 nt, Human
uuugcagugagcugagauugcgcuacuacgcu

SEQ ID NO: 545991 - RNA, 32 nt, Human
uuugcaguggguggaguuguggauagggguga

SEQ ID NO: 545992 - RNA, 32 nt, Human
uuugcaguuacucaucugagacagcaucagua

SEQ ID NO: 545993 - RNA, 32 nt, Human
uuugcaguucugcccuccaccuugcuaucugc

SEQ ID NO: 545994 - RNA, 32 nt, Human
uuugcaguugcagacgucugugccuagcaaua

SEQ ID NO: 545995 - RNA, 32 nt, Human
uuugcauaagaaaggcuuuucucuccagucau

SEQ ID NO: 545996 - RNA, 32 nt, Human
uuugcauaguaagcgccaggcuuugccaucga

SEQ ID NO: 545997 - RNA, 32 nt, Human
uuugcauaguauagggacuugaaaguuuuaug

SEQ ID NO: 545998 - RNA, 32 nt, Human
uuugcauaucacccuucccugcucccaccacc

SEQ ID NO: 545999 - RNA, 32 nt, Human
uuugcaucaagaaaaagcaccucucuucaccu

SEQ ID NO: 546000 - RNA, 32 nt, Human
uuugcaucacugcacuccagccugggcaacag

SEQ ID NO: 546001 - RNA, 32 nt, Human
uuugcaucacugcacuccagccugggcagcag

SEQ ID NO: 546002 - RNA, 22 nt, Human
uuugcaucagcagugguagaag

SEQ ID NO: 546003 - RNA, 32 nt, Human
uuugcaucauuuccccucucuggcuccaauuu

SEQ ID NO: 546004 - RNA, 32 nt, Human
uuugcaucuccaggcaguucucucacauuugg

SEQ ID NO: 546005 - RNA, 32 nt, Human
uuugcaugaaucacaaagcagaaugguaccuu

SEQ ID NO: 546006 - RNA, 32 nt, Human
uuugcaugaauuugaagaacacaggcuuguac

SEQ ID NO: 546007 - RNA, 30 nt, Human
uuugcaugacacagcaagcccagugucccc

SEQ ID NO: 546008 - RNA, 21 nt, Human
uuugcaugccugaauauucuc

SEQ ID NO: 546009 - RNA, 32 nt, Human
uuugcaugcuaaaauucucccggccucauccu

SEQ ID NO: 546010 - RNA, 32 nt, Human
uuugcauggauggaugcaugcauugccuaguc

SEQ ID NO: 546011 - RNA, 32 nt, Human
uuugcaugggaggcagguggggcuuggaucag

SEQ ID NO: 546012 - RNA, 32 nt, Human
uuugcauggguuuucugggaaauuaggauaac

SEQ ID NO: 546013 - RNA, 32 nt, Human
uuugcaugucaaaucacauugaagccugaaga

SEQ ID NO: 546014 - RNA, 32 nt, Human
uuugcaugugcaaaugugcuggucacccuuca

SEQ ID NO: 546015 - RNA, 23 nt, Human
uuugcauguucuaaaguugugua

SEQ ID NO: 546016 - RNA, 32 nt, Human
uuugcauuaaaauagcaaaaucugccgggcau

SEQ ID NO: 546017 - RNA, 32 nt, Human
uuugcauuacuguaugucuucugccuccacac

SEQ ID NO: 546018 - RNA, 27 nt, Human
uuugcauucugcagguuuuccauuuua

SEQ ID NO: 546019 - RNA, 32 nt, Human
uuugcauuucccccuccuccagccucuguagg

SEQ ID NO: 546020 - RNA, 32 nt, Human
uuugcauuugcauuuaucucuccugagcaucc

SEQ ID NO: 546021 - RNA, 32 nt, Human
uuugcauuuggguaaaauaaagugaccaugcu

SEQ ID NO: 546022 - RNA, 21 nt, Human
uuugcauuuuaaaacucugua

SEQ ID NO: 546023 - RNA, 32 nt, Human
uuugcauuuuccacucaugcagcugguucuau

SEQ ID NO: 546024 - RNA, 32 nt, Human
uuugccaaagagaguaauccuggaaccaaguu

SEQ ID NO: 546025 - RNA, 32 nt, Human
uuugccaaauaacaaaagcauacaaugcauac

SEQ ID NO: 546026 - RNA, 32 nt, Human
uuugccaacauggugaaacuccaucucuacug

SEQ ID NO: 546027 - RNA, 32 nt, Human
uuugccaagaugcuagucacacaccaaguaca

SEQ ID NO: 546028 - RNA, 32 nt, Human
uuugccaagggagagacaugaagacagaggag

SEQ ID NO: 546029 - RNA, 32 nt, Human
uuugccaagggaggcggauuucccugguagug

SEQ ID NO: 546030 - RNA, 32 nt, Human
uuugccaagucuucuguaaagaugucuaggac

SEQ ID NO: 546031 - RNA, 32 nt, Human
uuugccaaguguuuuuacaucaucucauuuga

SEQ ID NO: 546032 - RNA, 32 nt, Human
uuugccaaugaagaaauggucuguagguauuu

SEQ ID NO: 546033 - RNA, 32 nt, Human
uuugccacaaaaccuguauuacugaauaauau

SEQ ID NO: 546034 - RNA, 32 nt, Human
uuugccacaagagauccuuucagucccuagac

SEQ ID NO: 546035 - RNA, 32 nt, Human
uuugccacaguguggagcagauuuucucacug

SEQ ID NO: 546036 - RNA, 32 nt, Human
uuugccaccacugcaagcaaaagucuggagaa

SEQ ID NO: 546037 - RNA, 32 nt, Human
uuugccaccaucuccuccucugaucuccuuuc

SEQ ID NO: 546038 - RNA, 32 nt, Human
uuugccacccaugccucuucaggcuggaaaua

SEQ ID NO: 546039 - RNA, 32 nt, Human
uuugccacguucuaaauaauauuuagcucaac

SEQ ID NO: 546040 - RNA, 32 nt, Human
uuugccacucgccucuaucuuugaaucauauu

SEQ ID NO: 546041 - RNA, 32 nt, Human
uuugccacugacuucucccacccuucugucuc

SEQ ID NO: 546042 - RNA, 32 nt, Human
uuugccacugaggaguuggagggagggcaaga

SEQ ID NO: 546043 - RNA, 32 nt, Human
uuugccacugcacuccugccugggugacagaa

SEQ ID NO: 546044 - RNA, 32 nt, Human
uuugccacuuaacuccaguguggaugacagag

SEQ ID NO: 546045 - RNA, 32 nt, Human
uuugccacuuucccccucacauugauuaaggu

SEQ ID NO: 546046 - RNA, 32 nt, Human
uuugccagacaaguggagauuuuugcagcuca

SEQ ID NO: 546047 - RNA, 32 nt, Human
uuugccagagcacccuccuucaguccuccgau

SEQ ID NO: 546048 - RNA, 32 nt, Human
uuugccagaggaccaaugcuugcauggagaau

SEQ ID NO: 546049 - RNA, 32 nt, Human
uuugccagauagccucugucugccuagugaga

SEQ ID NO: 546050 - RNA, 32 nt, Human
uuugccagccuccaccuucuaacccuccuaga

SEQ ID NO: 546051 - RNA, 32 nt, Human
uuugccagccuggcaacagagcaagacucugu

SEQ ID NO: 546052 - RNA, 32 nt, Human
uuugccagcuccauacauguuggggccugagg

SEQ ID NO: 546053 - RNA, 32 nt, Human
uuugccaguaaaccaaaaagcagauccuugaa

SEQ ID NO: 546054 - RNA, 32 nt, Human
uuugccagugccauguccagguggugagguau

SEQ ID NO: 546055 - RNA, 32 nt, Human
uuugccaguggaaucugcugggccagucccua

SEQ ID NO: 546056 - RNA, 32 nt, Human
uuugccaguuauuuuuauugucuuuuacuuuu

SEQ ID NO: 546057 - RNA, 32 nt, Human
uuugccaucaccaguuucucaggcuggggagc

SEQ ID NO: 546058 - RNA, 32 nt, Human
uuugccaucgccaaggaguaggcacagggaca

SEQ ID NO: 546059 - RNA, 32 nt, Human
uuugccaucuaugccagcauuuuuaccuucaa

SEQ ID NO: 546060 - RNA, 32 nt, Human
uuugccaucuccugcacagccugggggagcua

SEQ ID NO: 546061 - RNA, 32 nt, Human
uuugccaugacugcucugggccggggguagag

SEQ ID NO: 546062 - RNA, 32 nt, Human
uuugccaugcaggaacaugagcaauacagaag

SEQ ID NO: 546063 - RNA, 32 nt, Human
uuugccauggagagaauagcaucucuauucca

SEQ ID NO: 546064 - RNA, 32 nt, Human
uuugccauguugcccaggcuggucugaagcug

SEQ ID NO: 546065 - RNA, 32 nt, Human
uuugccauguuggccaggcuggucuagaacuc

SEQ ID NO: 546066 - RNA, 32 nt, Human
uuugccauuacuagccagcugugggcucuuca

SEQ ID NO: 546067 - RNA, 32 nt, Human
uuugcccaagagaaagacuagaaggacuaaaa

SEQ ID NO: 546068 - RNA, 32 nt, Human
uuugcccaauaaaggaauuacagggaaaaaga

SEQ ID NO: 546069 - RNA, 32 nt, Human
uuugcccacccugcccucucucccucugccuu

SEQ ID NO: 546070 - RNA, 32 nt, Human
uuugcccacguguccugaggggcugcuugucu

SEQ ID NO: 546071 - RNA, 32 nt, Human
uuugcccacugcacacuugcuguguacaauga

SEQ ID NO: 546072 - RNA, 32 nt, Human
uuugcccagcuuucugucuggggcgcacggag

SEQ ID NO: 546073 - RNA, 23 nt, Human
uuugcccaggccggagugcaaug

SEQ ID NO: 546074 - RNA, 23 nt, Human
uuugcccaggcuggagcgaagug

SEQ ID NO: 546075 - RNA, 23 nt, Human
uuugcccaggcuggagugcagug

SEQ ID NO: 546076 - RNA, 24 nt, Human
uuugcccaggcuggagugcagugg

SEQ ID NO: 546077 - RNA, 32 nt, Human
uuugcccaggcuggauggagugcaguggcgug

SEQ ID NO: 546078 - RNA, 32 nt, Human
uuugcccauagucuugaaugcaauauuuguuu

SEQ ID NO: 546079 - RNA, 32 nt, Human
uuugccccaagaaguguuuggauaaccacaca

SEQ ID NO: 546080 - RNA, 32 nt, Human
uuugccccaccaccaccuccucgggcuucauu

SEQ ID NO: 546081 - RNA, 32 nt, Human
uuugccccagguguuugugagcagguugggau

SEQ ID NO: 546082 - RNA, 32 nt, Human
uuugccccaguucugggcagccacaggccccc

SEQ ID NO: 546083 - RNA, 32 nt, Human
uuugccccauuuccuaucucuagcaaccuccu

SEQ ID NO: 546084 - RNA, 32 nt, Human
uuugcccccaacaaagagaaggggucuugcuc

SEQ ID NO: 546085 - RNA, 32 nt, Human
uuugcccccugggccaggcagagcaggcgcug

SEQ ID NO: 546086 - RNA, 32 nt, Human
uuugccccgaaugagagguugaggaaaagacu

SEQ ID NO: 546087 - RNA, 32 nt, Human
uuugccccgcugcucugcuccgcccauaagag

SEQ ID NO: 546088 - RNA, 32 nt, Human
uuugccccuccccaucacaguccugcccuuca

SEQ ID NO: 546089 - RNA, 32 nt, Human
uuugccccucggccgggagcggcuagccggga

SEQ ID NO: 546090 - RNA, 31 nt, Human
uuugccccugaagucaguuucaggggaagga

SEQ ID NO: 546091 - RNA, 32 nt, Human
uuugccccugaguugugucaggagauuugagg

SEQ ID NO: 546092 - RNA, 32 nt, Human
uuugccccuggcaaaugcacacaccucaugcu

SEQ ID NO: 546093 - RNA, 32 nt, Human
uuugccccuggcaaaugcauacaccucaugcu

SEQ ID NO: 546094 - RNA, 32 nt, Human
uuugccccuucccaucucuuccuacccaacca

SEQ ID NO: 546095 - RNA, 32 nt, Human
uuugcccgagacugaaggauuucucaggcugu

SEQ ID NO: 546096 - RNA, 32 nt, Human
uuugcccuaaaauuaaaggugucaaagagggg

SEQ ID NO: 546097 - RNA, 21 nt, Human
uuugcccucagugccagccaa

SEQ ID NO: 546098 - RNA, 32 nt, Human
uuugcccucccaggacccugagguugcuuuau

SEQ ID NO: 546099 - RNA, 19 nt, Human
uuugcccuccgcaggagcc

SEQ ID NO: 546100 - RNA, 32 nt, Human
uuugcccucucgccuccuccuccugggaagaa

SEQ ID NO: 546101 - RNA, 32 nt, Human
uuugcccucucuugacuccagccuagggaaug

SEQ ID NO: 546102 - RNA, 20 nt, Human
uuugcccucugcugucacca

SEQ ID NO: 546103 - RNA, 32 nt, Human
uuugcccucuuuccuucucuucuccucacagc

SEQ ID NO: 546104 - RNA, 32 nt, Human
uuugcccugaagaugcuggcagagcaggaugu

SEQ ID NO: 546105 - RNA, 32 nt, Human
uuugcccugaguccaagaggguccuuuaguac

SEQ ID NO: 546106 - RNA, 32 nt, Human
uuugcccugcagcaauucaccugccuuuccuu

SEQ ID NO: 546107 - RNA, 32 nt, Human
uuugcccugccugucucacaggccugcuguga

SEQ ID NO: 546108 - RNA, 32 nt, Human
uuugcccugcuccucaccuccuggcccugcuc

SEQ ID NO: 546109 - RNA, 32 nt, Human
uuugcccugcugugugugccucuguagcuccu

SEQ ID NO: 546110 - RNA, 32 nt, Human
uuugcccuguugguaaggauuuuaaauaacca

SEQ ID NO: 546111 - RNA, 25 nt, Human
uuugcccuuccuccugccuuucuca

SEQ ID NO: 546112 - RNA, 32 nt, Human
uuugcccuuccuuucuuuaaagcuauucucac

SEQ ID NO: 546113 - RNA, 32 nt, Human
uuugcccuucuuucuacccugcuggggaaagu

SEQ ID NO: 546114 - RNA, 24 nt, Human
uuugcccuuuagggcuguugcuag

SEQ ID NO: 546115 - RNA, 32 nt, Human
uuugcccuuuccaacggcuauggcaucagguu

SEQ ID NO: 546116 - RNA, 32 nt, Human
uuugcccuuuccaacucuagacuauugauucc

SEQ ID NO: 546117 - RNA, 32 nt, Human
uuugcccuuuguccuguucccucagaagcaug

SEQ ID NO: 546118 - RNA, 19 nt, Human
uuugccgccugcaaggcgg

SEQ ID NO: 546119 - RNA, 32 nt, Human
uuugccgcgggugugugaagggagacagugug

SEQ ID NO: 546120 - RNA, 32 nt, Human
uuugccgcuagucccugugaagcucugccagg

SEQ ID NO: 546121 - RNA, 32 nt, Human
uuugccguacuuccuagaagcacuggaagagg

SEQ ID NO: 546122 - RNA, 32 nt, Human
uuugccguagaaacuccagcugucacugcggg

SEQ ID NO: 546123 - RNA, 32 nt, Human
uuugccguccccuggccaggaugguggagucu

SEQ ID NO: 546124 - RNA, 32 nt, Human
uuugccgucugcgcuccagccuucgccuggca

SEQ ID NO: 546125 - RNA, 32 nt, Human
uuugccuacucuuugccccagcaauuccucgu

SEQ ID NO: 546126 - RNA, 32 nt, Human
uuugccuagaauccuguucucuucugaauuug

SEQ ID NO: 546127 - RNA, 32 nt, Human
uuugccuagcagagaaggaccacaaaggaacu

SEQ ID NO: 546128 - RNA, 32 nt, Human
uuugccucaaagccaucccccaccagacugcu

SEQ ID NO: 546129 - RNA, 32 nt, Human
uuugccucaagcaaccucuagcucccacaauu

SEQ ID NO: 546130 - RNA, 32 nt, Human
uuugccucagaaccucuccuucaggagcacuu

SEQ ID NO: 546131 - RNA, 32 nt, Human
uuugccucauuuucucuuuuuguucacaagag

SEQ ID NO: 546132 - RNA, 32 nt, Human
uuugccuccagcugccucagucucuucaugug

SEQ ID NO: 546133 - RNA, 32 nt, Human
uuugccuccauccuuuucucacagcaaugaau

SEQ ID NO: 546134 - RNA, 32 nt, Human
uuugccucccaaagugcugggauuacaagcau

SEQ ID NO: 546135 - RNA, 32 nt, Human
uuugccucccaaagugcugggauuacaggcau

SEQ ID NO: 546136 - RNA, 32 nt, Human
uuugccucccaaagugcugggauuacaggcgu

SEQ ID NO: 546137 - RNA, 32 nt, Human
uuugccucccaccaugauucugaggccuccuc

SEQ ID NO: 546138 - RNA, 32 nt, Human
uuugccucccaccaugauucugaggcuuuccc

SEQ ID NO: 546139 - RNA, 32 nt, Human
uuugccucccacguugggaagucauuaguuga

SEQ ID NO: 546140 - RNA, 32 nt, Human
uuugccucccgaguagcugggauuacaggcac

SEQ ID NO: 546141 - RNA, 32 nt, Human
uuugccucccucucuucucuuugccuguaugc

SEQ ID NO: 546142 - RNA, 32 nt, Human
uuugccucucugaggcagacaggaagugucua

SEQ ID NO: 546143 - RNA, 32 nt, Human
uuugccucugaaggagcuucagcgccagccag

SEQ ID NO: 546144 - RNA, 32 nt, Human
uuugccucuuagguaagugagugcaguaaaga

SEQ ID NO: 546145 - RNA, 32 nt, Human
uuugccucuugggagcuuaugggucuaugagg

SEQ ID NO: 546146 - RNA, 32 nt, Human
uuugccucuuuccugagccucuugcuugaaug

SEQ ID NO: 546147 - RNA, 32 nt, Human
uuugccugaacacccauguagcugcuguguug

SEQ ID NO: 546148 - RNA, 32 nt, Human
uuugccugcacucuugccugcugcccugagca

SEQ ID NO: 546149 - RNA, 32 nt, Human
uuugccugccuucccuucauccuauccucuuu

SEQ ID NO: 546150 - RNA, 32 nt, Human
uuugccugcggucccagcuacuugggaagcug

SEQ ID NO: 546151 - RNA, 32 nt, Human
uuugccugcuucuuuccagaaaccaaacuagg

SEQ ID NO: 546152 - RNA, 32 nt, Human
uuugccuggcuaaaagagucucucucuaagua

SEQ ID NO: 546153 - RNA, 32 nt, Human
uuugccugggagaggcccugguggccucguuc

SEQ ID NO: 546154 - RNA, 32 nt, Human
uuugccugggugcugggccugccuucucuggc

SEQ ID NO: 546155 - RNA, 32 nt, Human
uuugccuggucccucuagcugcuggugguucu

SEQ ID NO: 546156 - RNA, 32 nt, Human
uuugccuguccguccuucccagaagagacaca

SEQ ID NO: 546157 - RNA, 15 nt, Human
uuugccugugccaug

SEQ ID NO: 546158 - RNA, 32 nt, Human
uuugccuguggauaagaugaccuguguaauaa

SEQ ID NO: 546159 - RNA, 32 nt, Human
uuugccuguggaucuguuuggccagggucccu

SEQ ID NO: 546160 - RNA, 32 nt, Human
uuugccuguuacugcugucuagacgccuucca

SEQ ID NO: 546161 - RNA, 32 nt, Human
uuugccuuacuuuugcccucucccauuuucug

SEQ ID NO: 546162 - RNA, 32 nt, Human
uuugccuuauaacugacauuucuucaaauuau

SEQ ID NO: 546163 - RNA, 32 nt, Human
uuugccuucagagagccccggggaggcugcaa

SEQ ID NO: 546164 - RNA, 32 nt, Human
uuugccuucaugcugguuuaccccaaagaguu

SEQ ID NO: 546165 - RNA, 32 nt, Human
uuugccuuccaacugccagaacauggauucca

SEQ ID NO: 546166 - RNA, 32 nt, Human
uuugccuuccaggggaccuuugcagugccugg

SEQ ID NO: 546167 - RNA, 32 nt, Human
uuugccuuccauuuuucuggguaauguccuuu

SEQ ID NO: 546168 - RNA, 32 nt, Human
uuugccuucccuaccucuuccucccagagucc

SEQ ID NO: 546169 - RNA, 32 nt, Human
uuugccuucggacuucuccggggccagcagcc

SEQ ID NO: 546170 - RNA, 32 nt, Human
uuugccuucucccugggaacugguucaagaga

SEQ ID NO: 546171 - RNA, 32 nt, Human
uuugccuucuugaugccagccugcugcaacag

SEQ ID NO: 546172 - RNA, 32 nt, Human
uuugccuugcagccacauggccccaucccagu

SEQ ID NO: 546173 - RNA, 32 nt, Human
uuugccuugcuuagagaauuacugcaaaucag

SEQ ID NO: 546174 - RNA, 32 nt, Human
uuugccuuggcuuagaggcugcagcacuucau

SEQ ID NO: 546175 - RNA, 32 nt, Human
uuugccuugguaggaauucuguucuguguugu

SEQ ID NO: 546176 - RNA, 32 nt, Human
uuugccuuguccucauuacugccaucaggaag

SEQ ID NO: 546177 - RNA, 32 nt, Human
uuugccuuguuuguuaguuugccugggucugu

SEQ ID NO: 546178 - RNA, 32 nt, Human
uuugccuuucccugguuuucuucaccaagccc

SEQ ID NO: 546179 - RNA, 32 nt, Human
uuugccuuuccuuugccacccucucccuguuu

SEQ ID NO: 546180 - RNA, 32 nt, Human
uuugccuuugagauguguuucuuucugccucc

SEQ ID NO: 546181 - RNA, 32 nt, Human
uuugccuuuguuugcacuguguguucagugaa

SEQ ID NO: 546182 - RNA, 32 nt, Human
uuugccuuuucugccauuuuaauuuuccauuu

SEQ ID NO: 546183 - RNA, 24 nt, Human
uuugcgaccagccugggcagaaua

SEQ ID NO: 546184 - RNA, 32 nt, Human
uuugcgaccagccugggcagaauagcaagacc

SEQ ID NO: 546185 - RNA, 32 nt, Human
uuugcgaccagccuggucaacauaguggaccc

SEQ ID NO: 546186 - RNA, 32 nt, Human
uuugcgaccccgagucccaugacaccgcuucu

SEQ ID NO: 546187 - RNA, 32 nt, Human
uuugcgcacaccauggcggccccugcccagca

SEQ ID NO: 546188 - RNA, 32 nt, Human
uuugcgccacugcauucuagccugagugacag

SEQ ID NO: 546189 - RNA, 32 nt, Human
uuugcgcuagcuuggaaaaugauugagaucaa

SEQ ID NO: 546190 - RNA, 31 nt, Human
uuugcgcuguuucagccuccugauucaacuc

SEQ ID NO: 546191 - RNA, 32 nt, Human
uuugcgcuuggaagcaggggaagcauucagau

SEQ ID NO: 546192 - RNA, 32 nt, Human
uuugcgcuuggugaagagaagcccccaccucc

SEQ ID NO: 546193 - RNA, 32 nt, Human
uuugcggauacuuugcuuauucguuuaacgac

SEQ ID NO: 546194 - RNA, 23 nt, Human
uuugcggaucggucacuuuuucc

SEQ ID NO: 546195 - RNA, 32 nt, Human
uuugcggggagagaggucagagccagaugaaa

SEQ ID NO: 546196 - RNA, 32 nt, Human
uuugcggggccugucucagugauucgcuuuug

SEQ ID NO: 546197 - RNA, 32 nt, Human
uuugcggugauaaccuucucuggcagagugac

SEQ ID NO: 546198 - RNA, 32 nt, Human
uuugcgguuaaccugaauucacugaacuggga

SEQ ID NO: 546199 - RNA, 32 nt, Human
uuugcgucugaagccuuucuccuuuucuguca

SEQ ID NO: 546200 - RNA, 32 nt, Human
uuugcgucuggcuucucuauugaauucuuaaa

SEQ ID NO: 546201 - RNA, 32 nt, Human
uuugcgugcaucagaaucacccagaaagaugu

SEQ ID NO: 546202 - RNA, 32 nt, Human
uuugcgugccugacagccuggcuagcacagga

SEQ ID NO: 546203 - RNA, 32 nt, Human
uuugcgugugugugcgugcgcaugugcuuccg

SEQ ID NO: 546204 - RNA, 32 nt, Human
uuugcguucuccccugccguccuucaacugua

SEQ ID NO: 546205 - RNA, 32 nt, Human
uuugcuaaaauuacguuaagaauguuugcauu

SEQ ID NO: 546206 - RNA, 32 nt, Human
uuugcuaaaccucuccucugacugccuuuauu

SEQ ID NO: 546207 - RNA, 32 nt, Human
uuugcuaacuauagauguccuuuaacaaaauu

SEQ ID NO: 546208 - RNA, 32 nt, Human
uuugcuaagacucaaacggcuugagugcagca

SEQ ID NO: 546209 - RNA, 32 nt, Human
uuugcuaauaugaauggugcugugaggaacau

SEQ ID NO: 546210 - RNA, 32 nt, Human
uuugcuaauguuccagcaacacugcuauuaua

SEQ ID NO: 546211 - RNA, 32 nt, Human
uuugcuacacuucuccccaccugguacaugau

SEQ ID NO: 546212 - RNA, 32 nt, Human
uuugcuaccaggacaggcucucgacagggcau

SEQ ID NO: 546213 - RNA, 32 nt, Human
uuugcuaccauuuugacccauuauucccuuac

SEQ ID NO: 546214 - RNA, 32 nt, Human
uuugcuacuguacauaaacaaugaugcccugc

SEQ ID NO: 546215 - RNA, 32 nt, Human
uuugcuacuuuuacuuucaucuuccucugcug

SEQ ID NO: 546216 - RNA, 32 nt, Human
uuugcuagaagaguggucaagggaaaaacgag

SEQ ID NO: 546217 - RNA, 32 nt, Human
uuugcuagaaggacucacuagacucaggaaag

SEQ ID NO: 546218 - RNA, 32 nt, Human
uuugcuagauggagucuugcucugucaccagg

SEQ ID NO: 546219 - RNA, 30 nt, Human
uuugcuagccucuucauaugcuguugcaua

SEQ ID NO: 546220 - RNA, 32 nt, Human
uuugcuagucagacaagugacagggaauggau

SEQ ID NO: 546221 - RNA, 32 nt, Human
uuugcuauauguuuugcuauuuccuuguggcu

SEQ ID NO: 546222 - RNA, 32 nt, Human
uuugcuauugaauuggccagcucugcuugcug

SEQ ID NO: 546223 - RNA, 32 nt, Human
uuugcuauuucuuuucuugcuggagccucacc

SEQ ID NO: 546224 - RNA, 32 nt, Human
uuugcucacagcaauucuccuucuacagagga

SEQ ID NO: 546225 - RNA, 32 nt, Human
uuugcucacaugcaagacacauacagcccuau

SEQ ID NO: 546226 - RNA, 32 nt, Human
uuugcucacuauccccagccucaaggagccaa

SEQ ID NO: 546227 - RNA, 32 nt, Human
uuugcucacugcaacauccaccucaugggcuc

SEQ ID NO: 546228 - RNA, 32 nt, Human
uuugcucacuucugccaagaacacagaacuac

SEQ ID NO: 546229 - RNA, 32 nt, Human
uuugcucagacacacauauucuuucucccaau

SEQ ID NO: 546230 - RNA, 32 nt, Human
uuugcucauauucacauauguaaaccagaaca

SEQ ID NO: 546231 - RNA, 32 nt, Human
uuugcucaugccaugcccucagccuggaaugc

SEQ ID NO: 546232 - RNA, 32 nt, Human
uuugcuccaaauuccuccucugcguccaggag

SEQ ID NO: 546233 - RNA, 32 nt, Human
uuugcucccaggcuggaaugcaguggcuauuc

SEQ ID NO: 546234 - RNA, 32 nt, Human
uuugcucccuccaaucuugagauuggguuuug

SEQ ID NO: 546235 - RNA, 32 nt, Human
uuugcucccuuuuucuuuuucuccccuuccuc

SEQ ID NO: 546236 - RNA, 32 nt, Human
uuugcuccuaauggcucucugaaagugacaga

SEQ ID NO: 546237 - RNA, 32 nt, Human
uuugcuccuauuugugaacauucaaagccugc

SEQ ID NO: 546238 - RNA, 32 nt, Human
uuugcuccuguuccccucacagcuccagacau

SEQ ID NO: 546239 - RNA, 32 nt, Human
uuugcuccuguugccgcccucaucucagagaa

SEQ ID NO: 546240 - RNA, 32 nt, Human
uuugcucgaugcagacagggggccagaacacc

SEQ ID NO: 546241 - RNA, 32 nt, Human
uuugcucguuugggguguaaagugccaugacu

SEQ ID NO: 546242 - RNA, 32 nt, Human
uuugcucuccaccuccugccucugcuuauuuc

SEQ ID NO: 546243 - RNA, 32 nt, Human
uuugcucuccaggacaucagcacauggcccug

SEQ ID NO: 546244 - RNA, 32 nt, Human
uuugcucucccaggccccuggcuguccauguc

SEQ ID NO: 546245 - RNA, 22 nt, Human
uuugcucucccgcuguugccag

SEQ ID NO: 546246 - RNA, 32 nt, Human
uuugcucucccucccuucuuuccuuccuuuuu

SEQ ID NO: 546247 - RNA, 22 nt, Human
uuugcucucugguguuuguuaa

SEQ ID NO: 546248 - RNA, 32 nt, Human
uuugcucucuuuaagaccucacagauucugac

SEQ ID NO: 546249 - RNA, 32 nt, Human
uuugcucugcuacuugagaugauggagagcag

SEQ ID NO: 546250 - RNA, 32 nt, Human
uuugcucugucacccaggcuggaguacacugg

SEQ ID NO: 546251 - RNA, 32 nt, Human
uuugcucugucacccaggcuggagugaggugg

SEQ ID NO: 546252 - RNA, 32 nt, Human
uuugcucugucacccaggcuggagugcagugg

SEQ ID NO: 546253 - RNA, 32 nt, Human
uuugcucugucgcccaggcugcaaccucgacc

SEQ ID NO: 546254 - RNA, 32 nt, Human
uuugcucuguugcccaggcuggagugcagugg

SEQ ID NO: 546255 - RNA, 32 nt, Human
uuugcucuuaacuccaagucugcccuucuuuu

SEQ ID NO: 546256 - RNA, 32 nt, Human
uuugcucuuacccaggcugagugcaguggcag

SEQ ID NO: 546257 - RNA, 32 nt, Human
uuugcucuuacuacacugaggagagauucccg

SEQ ID NO: 546258 - RNA, 32 nt, Human
uuugcucuugcacuccauccuggacaacagag

SEQ ID NO: 546259 - RNA, 32 nt, Human
uuugcucuugccgaaaagaugagccucgauuu

SEQ ID NO: 546260 - RNA, 32 nt, Human
uuugcucuuggguggaggagacgaggggaggg

SEQ ID NO: 546261 - RNA, 32 nt, Human
uuugcugaaaauacaaaauuagccaggcgugg

SEQ ID NO: 546262 - RNA, 32 nt, Human
uuugcugaagaaauuguauuucaaccacaucc

SEQ ID NO: 546263 - RNA, 32 nt, Human
uuugcugacagcaggugcauuccugcuucccu

SEQ ID NO: 546264 - RNA, 32 nt, Human
uuugcugacagcugccaagaaaaugcuucacu

SEQ ID NO: 546265 - RNA, 32 nt, Human
uuugcugacuuacugaggauuaauuguugccu

SEQ ID NO: 546266 - RNA, 32 nt, Human
uuugcugagaaauaaaaaucaaaacuucuuua

SEQ ID NO: 546267 - RNA, 32 nt, Human
uuugcugagaauuuuggaaaugaagcaugugg

SEQ ID NO: 546268 - RNA, 32 nt, Human
uuugcugaugucuguaagaacucugucuaagc

SEQ ID NO: 546269 - RNA, 32 nt, Human
uuugcugauguucuuccaacucaguugaguga

SEQ ID NO: 546270 - RNA, 32 nt, Human
uuugcugauuauucaaccacagagccuuaugc

SEQ ID NO: 546271 - RNA, 32 nt, Human
uuugcugcaccuauugaccuauccugguaaau

SEQ ID NO: 546272 - RNA, 32 nt, Human
uuugcugcagaaaauuccaaaagauugcugua

SEQ ID NO: 546273 - RNA, 32 nt, Human
uuugcugcagcagccgcuggagggggcagagg

SEQ ID NO: 546274 - RNA, 32 nt, Human
uuugcugcagucuucucucuggcucaggugug

SEQ ID NO: 546275 - RNA, 32 nt, Human
uuugcugcaguuggagaagaaacugaauuuga

SEQ ID NO: 546276 - RNA, 32 nt, Human
uuugcugccacaccugagccagccugcuccuu

SEQ ID NO: 546277 - RNA, 32 nt, Human
uuugcugccaucuuccucaucauaaagugugg

SEQ ID NO: 546278 - RNA, 32 nt, Human
uuugcugccccagcuacuaaggugcuaggaau

SEQ ID NO: 546279 - RNA, 32 nt, Human
uuugcugccccucuccccuaccuggcccauuc

SEQ ID NO: 546280 - RNA, 32 nt, Human
uuugcugcccucuuugccccagagcugaagag

SEQ ID NO: 546281 - RNA, 32 nt, Human
uuugcugccguugggggcucaggcugcacucc

SEQ ID NO: 546282 - RNA, 32 nt, Human
uuugcugccuuccuggccagccagguggaaga

SEQ ID NO: 546283 - RNA, 32 nt, Human
uuugcugcuaagaaggcgugcccaguggggua

SEQ ID NO: 546284 - RNA, 32 nt, Human
uuugcugcuacuucuguggaaguagcuuugaa

SEQ ID NO: 546285 - RNA, 32 nt, Human
uuugcugcuaggaaggcgugcccaguggggua

SEQ ID NO: 546286 - RNA, 32 nt, Human
uuugcugcucacugagaacccagcuuugaacu

SEQ ID NO: 546287 - RNA, 31 nt, Human
uuugcugcucacuucugacagccagacaagg

SEQ ID NO: 546288 - RNA, 32 nt, Human
uuugcugcucacuucugacagccagacaaggg

SEQ ID NO: 546289 - RNA, 32 nt, Human
uuugcugcugagcuggaagcugugggggaagg

SEQ ID NO: 546290 - RNA, 32 nt, Human
uuugcugcuggggaggcuggaagcauauuccc

SEQ ID NO: 546291 - RNA, 23 nt, Human
uuugcugcuuccugucucugcca

SEQ ID NO: 546292 - RNA, 32 nt, Human
uuugcugcuuugcauccucuccaggcucugga

SEQ ID NO: 546293 - RNA, 32 nt, Human
uuugcugcuuuuauuuucuuccaagccaauca

SEQ ID NO: 546294 - RNA, 32 nt, Human
uuugcuggaugguuccuuuaugcagcuuggcc

SEQ ID NO: 546295 - RNA, 32 nt, Human
uuugcuggcacacacccucaagggugguucag

SEQ ID NO: 546296 - RNA, 32 nt, Human
uuugcugggcacuaugcuaagcacuuugggag

SEQ ID NO: 546297 - RNA, 32 nt, Human
uuugcugggcucuccagagcugggcuuggcuc

SEQ ID NO: 546298 - RNA, 32 nt, Human
uuugcuggggccaacaccagccuaaguggaga

SEQ ID NO: 546299 - RNA, 32 nt, Human
uuugcugggggagggugugagcacggaguauu

SEQ ID NO: 546300 - RNA, 32 nt, Human
uuugcuggguaugggaguuuaagcccggcaga

SEQ ID NO: 546301 - RNA, 32 nt, Human
uuugcuggguccaucacagaagagucucuaca

SEQ ID NO: 546302 - RNA, 32 nt, Human
uuugcuggguguggaaagaguugcuauggcca

SEQ ID NO: 546303 - RNA, 32 nt, Human
uuugcuggucucaaacuccugaccucggguga

SEQ ID NO: 546304 - RNA, 32 nt, Human
uuugcuguccucucugugaugacuuguugcug

SEQ ID NO: 546305 - RNA, 32 nt, Human
uuugcuguccuuccucuccuucgaagaugaca

SEQ ID NO: 546306 - RNA, 32 nt, Human
uuugcugucugcagauggcuugagugcuaauc

SEQ ID NO: 546307 - RNA, 32 nt, Human
uuugcugucuucccucucccucaggccauacu

SEQ ID NO: 546308 - RNA, 32 nt, Human
uuugcugugccaacagggaggacagggccugg

SEQ ID NO: 546309 - RNA, 32 nt, Human
uuugcuguggauucagaagcaccaggagcaag

SEQ ID NO: 546310 - RNA, 32 nt, Human
uuugcugugguguuggguggcuccuaucuauu

SEQ ID NO: 546311 - RNA, 32 nt, Human
uuugcuguuaaugcugcugcuuugccaaugaa

SEQ ID NO: 546312 - RNA, 32 nt, Human
uuugcuguugcuugcugaacugugaagaacug

SEQ ID NO: 546313 - RNA, 32 nt, Human
uuugcuguuuucucaugucucucccaguguga

SEQ ID NO: 546314 - RNA, 32 nt, Human
uuugcuuagcauuauucuuuccuauuauuuua

SEQ ID NO: 546315 - RNA, 32 nt, Human
uuugcuuagcccacaagguaucuauuucacuu

SEQ ID NO: 546316 - RNA, 32 nt, Human
uuugcuuaggauugcacuggcuuugggggcuu

SEQ ID NO: 546317 - RNA, 32 nt, Human
uuugcuuaguacucagccagugccacaguuug

SEQ ID NO: 546318 - RNA, 27 nt, Human
uuugcuuagucaccuuuaguggaguaa

SEQ ID NO: 546319 - RNA, 32 nt, Human
uuugcuuaguccuuaccauauguaauaggcag

SEQ ID NO: 546320 - RNA, 32 nt, Human
uuugcuuauucaucaauaacuaauccaauaug

SEQ ID NO: 546321 - RNA, 32 nt, Human
uuugcuucaagcucuguagcaggaccugcccc

SEQ ID NO: 546322 - RNA, 32 nt, Human
uuugcuucacugcaauuuguuucugaucucca

SEQ ID NO: 546323 - RNA, 32 nt, Human
uuugcuucagagacuccuuucuggccuaacag

SEQ ID NO: 546324 - RNA, 32 nt, Human
uuugcuucagcaggauccuugugggccuucua

SEQ ID NO: 546325 - RNA, 32 nt, Human
uuugcuucauucagcccuagcucuguagagaa

SEQ ID NO: 546326 - RNA, 32 nt, Human
uuugcuuccaucauccagccccugggcaacau

SEQ ID NO: 546327 - RNA, 32 nt, Human
uuugcuucccaggcuggagugcaguggugcga

SEQ ID NO: 546328 - RNA, 32 nt, Human
uuugcuuccccacugcccccugcccuccagcc

SEQ ID NO: 546329 - RNA, 32 nt, Human
uuugcuucccuuagaacuacagacucgaaauc

SEQ ID NO: 546330 - RNA, 32 nt, Human
uuugcuuccucccucucuccucccucccagac

SEQ ID NO: 546331 - RNA, 32 nt, Human
uuugcuucuccaagugaagcucagaaauaccu

SEQ ID NO: 546332 - RNA, 32 nt, Human
uuugcuucucgguuauccugugcuucagauga

SEQ ID NO: 546333 - RNA, 32 nt, Human
uuugcuucucucuuaauuaauaacacagacac

SEQ ID NO: 546334 - RNA, 32 nt, Human
uuugcuugaacagcuucuccugaguccuccuu

SEQ ID NO: 546335 - RNA, 32 nt, Human
uuugcuugaacccaagagguccaaggcugcag

SEQ ID NO: 546336 - RNA, 32 nt, Human
uuugcuugaacccaggaggcagagguugcagu

SEQ ID NO: 546337 - RNA, 32 nt, Human
uuugcuugaacccgggaggcggagguugcagu

SEQ ID NO: 546338 - RNA, 32 nt, Human
uuugcuugaagccagaggucaguggccgugcu

SEQ ID NO: 546339 - RNA, 32 nt, Human
uuugcuugagacucagaggaguucucaugaua

SEQ ID NO: 546340 - RNA, 31 nt, Human
uuugcuugccucucuguuuguaaccuugucg

SEQ ID NO: 546341 - RNA, 32 nt, Human
uuugcuugcugaggcccuagacuugacagugg

SEQ ID NO: 546342 - RNA, 32 nt, Human
uuugcuugggcucccccuucauggccucugca

SEQ ID NO: 546343 - RNA, 32 nt, Human
uuugcuuggggaugugcuuggagaggcagaua

SEQ ID NO: 546344 - RNA, 32 nt, Human
uuugcuuguaaaugcaucacgaagaggcagcc

SEQ ID NO: 546345 - RNA, 25 nt, Human
uuugcuuguacagaaucuguaguga

SEQ ID NO: 546346 - RNA, 24 nt, Human
uuugcuugucuuccacuccugcca

SEQ ID NO: 546347 - RNA, 32 nt, Human
uuugcuugugcaaaagggaauagugccgugga

SEQ ID NO: 546348 - RNA, 32 nt, Human
uuugcuuguuacucaucuguugaccuaccugg

SEQ ID NO: 546349 - RNA, 32 nt, Human
uuugcuuuagauuuucuucuguuuucaccauc

SEQ ID NO: 546350 - RNA, 32 nt, Human
uuugcuuuagguuuuugaaacagccccggcga

SEQ ID NO: 546351 - RNA, 32 nt, Human
uuugcuuuaguauuuuaauaagaauuacaaag

SEQ ID NO: 546352 - RNA, 32 nt, Human
uuugcuuuauggccuuuccaucauaguugccc

SEQ ID NO: 546353 - RNA, 21 nt, Human
uuugcuuuccuguauagccag

SEQ ID NO: 546354 - RNA, 32 nt, Human
uuugcuuucucccauuuuuaagagaugguaag

SEQ ID NO: 546355 - RNA, 32 nt, Human
uuugcuuucugcucagcuucuccugugugauu

SEQ ID NO: 546356 - RNA, 32 nt, Human
uuugcuuugacaccugaugccaggacaauagu

SEQ ID NO: 546357 - RNA, 32 nt, Human
uuugcuuuggaugcacuguuguucuguuaagg

SEQ ID NO: 546358 - RNA, 32 nt, Human
uuugcuuuggguuuguggcacccuggccaccc

SEQ ID NO: 546359 - RNA, 32 nt, Human
uuugcuuugugaauuuggcuucauuuuacuua

SEQ ID NO: 546360 - RNA, 32 nt, Human
uuugcuuuguuuuuggacaaaagagucuaaca

SEQ ID NO: 546361 - RNA, 32 nt, Human
uuugcuuuugacuccaggaacaaaaagguaaa

SEQ ID NO: 546362 - RNA, 32 nt, Human
uuugcuuuugcucgaugcagacagggggccag

SEQ ID NO: 546363 - RNA, 32 nt, Human
uuugcuuuugcuucucuccucugaagugugag

SEQ ID NO: 546364 - RNA, 31 nt, Human
uuugcuuuuggagcucuucagaugcuguccc

SEQ ID NO: 546365 - RNA, 32 nt, Human
uuugcuuuuggcggccucugcaggccucgaca

SEQ ID NO: 546366 - RNA, 32 nt, Human
uuugcuuuuucccuuuuccuacagacguauau

SEQ ID NO: 546367 - RNA, 23 nt, Human
uuuggaaaaacccauuccuucca

SEQ ID NO: 546368 - RNA, 32 nt, Human
uuuggaaagaagaaauacacagaugagccccu

SEQ ID NO: 546369 - RNA, 32 nt, Human
uuuggaaagcuacaguaauuucuguauuacau

SEQ ID NO: 546370 - RNA, 32 nt, Human
uuuggaaauauucucauucuuaguggggaugu

SEQ ID NO: 546371 - RNA, 32 nt, Human
uuuggaaauguccucauuauguagaauggaau

SEQ ID NO: 546372 - RNA, 32 nt, Human
uuuggaacaaguguucagagcagacagaagca

SEQ ID NO: 546373 - RNA, 32 nt, Human
uuuggaacaugaauacuccugaggguucacaa

SEQ ID NO: 546374 - RNA, 21 nt, Human
uuuggaaccagacucuugccu

SEQ ID NO: 546375 - RNA, 32 nt, Human
uuuggaacccuuuagcuuuguuuuggaauggc

SEQ ID NO: 546376 - RNA, 32 nt, Human
uuuggaaccuaugaacacuuugaggcugccac

SEQ ID NO: 546377 - RNA, 32 nt, Human
uuuggaacugauucauaagaaaaguuauuaaa

SEQ ID NO: 546378 - RNA, 32 nt, Human
uuuggaacuggguaacaggcaggguuuggaac

SEQ ID NO: 546379 - RNA, 32 nt, Human
uuuggaacuguguuucaaauggacuguuacag

SEQ ID NO: 546380 - RNA, 32 nt, Human
uuuggaagacccagagaggccaagaucccauc

SEQ ID NO: 546381 - RNA, 32 nt, Human
uuuggaagagaaggugaggagcauuucaggau

SEQ ID NO: 546382 - RNA, 32 nt, Human
uuuggaagagcaugaguuccauaucugagaug

SEQ ID NO: 546383 - RNA, 32 nt, Human
uuuggaagauccugugaggagccccaucuguc

SEQ ID NO: 546384 - RNA, 32 nt, Human
uuuggaagaugauaccuuuuugcucagcuguc

SEQ ID NO: 546385 - RNA, 32 nt, Human
uuuggaagaugcagcuugaggucugggggacu

SEQ ID NO: 546386 - RNA, 23 nt, Human
uuuggaagcaguuuccuuuuuca

SEQ ID NO: 546387 - RNA, 31 nt, Human
uuuggaaggcacuucuccugccuccugggag

SEQ ID NO: 546388 - RNA, 32 nt, Human
uuuggaaggcuuccuguuggauuccucuucau

SEQ ID NO: 546389 - RNA, 32 nt, Human
uuuggaaggggucuguagugucacucaaggcg

SEQ ID NO: 546390 - RNA, 32 nt, Human
uuuggaaggugacacugcucccugaauuaagg

SEQ ID NO: 546391 - RNA, 32 nt, Human
uuuggaaggugauacaguauguggguaaccau

SEQ ID NO: 546392 - RNA, 32 nt, Human
uuuggaaguacucugcaguggacauaagcauu

SEQ ID NO: 546393 - RNA, 32 nt, Human
uuuggaaguucaugauauuuugauuucaaugg

SEQ ID NO: 546394 - RNA, 22 nt, Human
uuuggaaucagaagaccuaccu

SEQ ID NO: 546395 - RNA, 32 nt, Human
uuuggaaucgccaguacaugggcaugggcaug

SEQ ID NO: 546396 - RNA, 32 nt, Human
uuuggaaucucaccacauauacuuuguuagau

SEQ ID NO: 546397 - RNA, 18 nt, Human
uuuggaaucucugaagua

SEQ ID NO: 546398 - RNA, 32 nt, Human
uuuggaaucugaagaauccuauguaaaucauu

SEQ ID NO: 546399 - RNA, 32 nt, Human
uuuggaaugguguaagccuaaccacaaguaaa

SEQ ID NO: 546400 - RNA, 32 nt, Human
uuuggaauguucucugugaaccacaguugugu

SEQ ID NO: 546401 - RNA, 32 nt, Human
uuuggaauuggguuuuucaaugaguggcuuua

SEQ ID NO: 546402 - RNA, 21 nt, Human
uuuggaauuuuccuuuucuua

SEQ ID NO: 546403 - RNA, 32 nt, Human
uuuggacacaauagugcacuuuaaaaccugcu

SEQ ID NO: 546404 - RNA, 32 nt, Human
uuuggacacacccaggaaggcuuuugaaguca

SEQ ID NO: 546405 - RNA, 32 nt, Human
uuuggacacaugcacacauacagucucuaggu

SEQ ID NO: 546406 - RNA, 20 nt, Human
uuuggacacuaguugccaag

SEQ ID NO: 546407 - RNA, 21 nt, Human
uuuggacacuucauuccuugc

SEQ ID NO: 546408 - RNA, 32 nt, Human
uuuggacacuuggggaaaagugaggccagucu

SEQ ID NO: 546409 - RNA, 32 nt, Human
uuuggacagaggcauuuucaccuuauggugaa

SEQ ID NO: 546410 - RNA, 32 nt, Human
uuuggacagauggcaggagaggagaacuucaa

SEQ ID NO: 546411 - RNA, 32 nt, Human
uuuggacagcaaccccugagcccaagccaguu

SEQ ID NO: 546412 - RNA, 32 nt, Human
uuuggacagccaagggcagaucacagguuauu

SEQ ID NO: 546413 - RNA, 32 nt, Human
uuuggacagccugagccaggaggcggagaggc

SEQ ID NO: 546414 - RNA, 32 nt, Human
uuuggacagcggaaacuccuucacagcggcug

SEQ ID NO: 546415 - RNA, 23 nt, Human
uuuggacaggccucuuugacaga

SEQ ID NO: 546416 - RNA, 27 nt, Human
uuuggacaucuuuuauuuuuugucaga

SEQ ID NO: 546417 - RNA, 32 nt, Human
uuuggacauggcagaaaccaggugaucagugg

SEQ ID NO: 546418 - RNA, 32 nt, Human
uuuggaccaaccccagaacagagcagagccac

SEQ ID NO: 546419 - RNA, 18 nt, Human
uuuggaccacucccuuca

SEQ ID NO: 546420 - RNA, 32 nt, Human
uuuggaccagccugggcaacauggugaaaccc

SEQ ID NO: 546421 - RNA, 32 nt, Human
uuuggaccaguucuugugccauuggcaggaug

SEQ ID NO: 546422 - RNA, 32 nt, Human
uuuggaccauugguuacaaaacagacacagcc

SEQ ID NO: 546423 - RNA, 23 nt, Human
uuuggaccauuuagcaucaugag

SEQ ID NO: 546424 - RNA, 32 nt, Human
uuuggaccauuuuuccggggaaggagauccag

SEQ ID NO: 546425 - RNA, 32 nt, Human
uuuggacccucagagccccugcagaggacgga

SEQ ID NO: 546426 - RNA, 32 nt, Human
uuuggacccucugcauuauuaaagcugcugua

SEQ ID NO: 546427 - RNA, 32 nt, Human
uuuggaccuaccccuguccuugcugacuugug

SEQ ID NO: 546428 - RNA, 32 nt, Human
uuuggaccuccaggggcuggagcuucaucacc

SEQ ID NO: 546429 - RNA, 32 nt, Human
uuuggaccugacuuugcuucucuccuuuuccu

SEQ ID NO: 546430 - RNA, 32 nt, Human
uuuggacgagcuguacaaggugcuggcagaga

SEQ ID NO: 546431 - RNA, 32 nt, Human
uuuggacuggacugucccugcucauccauucu

SEQ ID NO: 546432 - RNA, 32 nt, Human
uuuggacuggguuuuggaccuccaggggcugg

SEQ ID NO: 546433 - RNA, 32 nt, Human
uuuggacugucuuugaauccugucuuugguac

SEQ ID NO: 546434 - RNA, 32 nt, Human
uuuggacuguguccucagcuccuuccagauga

SEQ ID NO: 546435 - RNA, 32 nt, Human
uuuggacuugagugccuggaagcugaaugccc

SEQ ID NO: 546436 - RNA, 32 nt, Human
uuuggacuuuucucccuuuugcauuuggugcu

SEQ ID NO: 546437 - RNA, 32 nt, Human
uuuggagaaaauacagagacaaaaagaccauu

SEQ ID NO: 546438 - RNA, 32 nt, Human
uuuggagaaagacccagagaucaggcagaggu

SEQ ID NO: 546439 - RNA, 32 nt, Human
uuuggagaacaacauggauuucacagacauca

SEQ ID NO: 546440 - RNA, 25 nt, Human
uuuggagaacaucugcacuuucuua

SEQ ID NO: 546441 - RNA, 32 nt, Human
uuuggagaaccuuuucuucccauugcucucag

SEQ ID NO: 546442 - RNA, 32 nt, Human
uuuggagaagagcaagguguugaggagggcag

SEQ ID NO: 546443 - RNA, 31 nt, Human
uuuggagacaccugguugucacuggaggggg

SEQ ID NO: 546444 - RNA, 32 nt, Human
uuuggagacaggagucaggccaggucugaagc

SEQ ID NO: 546445 - RNA, 32 nt, Human
uuuggagacagggucuucacagaggugaucua

SEQ ID NO: 546446 - RNA, 32 nt, Human
uuuggagacagggucuuuacagagguaauaaa

SEQ ID NO: 546447 - RNA, 32 nt, Human
uuuggagacaguuuugcucuugucuccccggc

SEQ ID NO: 546448 - RNA, 32 nt, Human
uuuggagaccacaguuucuaacagacuuucaa

SEQ ID NO: 546449 - RNA, 32 nt, Human
uuuggagacucuuccuuuuguuuuacacccag

SEQ ID NO: 546450 - RNA, 32 nt, Human
uuuggagaucagccucaccuucucccauccca

SEQ ID NO: 546451 - RNA, 32 nt, Human
uuuggagaugaagauuugacuaacagugagcc

SEQ ID NO: 546452 - RNA, 32 nt, Human
uuuggagauuuuagguaagaaguuuccuguua

SEQ ID NO: 546453 - RNA, 31 nt, Human
uuuggagcacuuuucucuacugcagaucuau

SEQ ID NO: 546454 - RNA, 23 nt, Human
uuuggagcaguucugccuuuuca

SEQ ID NO: 546455 - RNA, 32 nt, Human
uuuggagcauuguucuaaaaaugggaaauuac

SEQ ID NO: 546456 - RNA, 32 nt, Human
uuuggagcccucucuuaagucagaacucuguc

SEQ ID NO: 546457 - RNA, 32 nt, Human
uuuggagcccucuugcuuaguugaaggaguuu

SEQ ID NO: 546458 - RNA, 32 nt, Human
uuuggagcucuauccauauuuuacugaucucu

SEQ ID NO: 546459 - RNA, 32 nt, Human
uuuggagcuggauuuuguuagcuaaacacaua

SEQ ID NO: 546460 - RNA, 32 nt, Human
uuuggagcuuacagucuguucuggggaacaga

SEQ ID NO: 546461 - RNA, 21 nt, Human
uuuggagcuuagccuuacuua

SEQ ID NO: 546462 - RNA, 24 nt, Human
uuuggagcuuuccuucuuuuuuca

SEQ ID NO: 546463 - RNA, 32 nt, Human
uuuggaggaauaaugacccaguauuuguccca

SEQ ID NO: 546464 - RNA, 32 nt, Human
uuuggaggaaucacuggcauuugauggggaau

SEQ ID NO: 546465 - RNA, 32 nt, Human
uuuggaggagaugggagcccagagagcuucca

SEQ ID NO: 546466 - RNA, 32 nt, Human
uuuggaggagggaggcaggaggugagguugga

SEQ ID NO: 546467 - RNA, 32 nt, Human
uuuggaggcagggcugggaagggagcgcucuc

SEQ ID NO: 546468 - RNA, 32 nt, Human
uuuggaggccaaggcggguggaucacgagguc

SEQ ID NO: 546469 - RNA, 32 nt, Human
uuuggaggcccaggcgggcggaucaccugagg

SEQ ID NO: 546470 - RNA, 32 nt, Human
uuuggaggccgagauggguggaucaucugagg

SEQ ID NO: 546471 - RNA, 32 nt, Human
uuuggaggccgaggcaggcggaucacuugagg

SEQ ID NO: 546472 - RNA, 32 nt, Human
uuuggaggccgaggcaggcggaucauuugagg

SEQ ID NO: 546473 - RNA, 32 nt, Human
uuuggaggccgaggcggguagaucaccugagg

SEQ ID NO: 546474 - RNA, 32 nt, Human
uuuggaggcuccaagccucaaagugcccgcag

SEQ ID NO: 546475 - RNA, 32 nt, Human
uuuggaggcugaagcggaaggaucccuuggcc

SEQ ID NO: 546476 - RNA, 32 nt, Human
uuuggaggcugaggcaggagaauugcuugaac

SEQ ID NO: 546477 - RNA, 32 nt, Human
uuuggaggcugaggugggaggaucauuugagc

SEQ ID NO: 546478 - RNA, 32 nt, Human
uuuggaggcuuccugacauuuacaguaauacc

SEQ ID NO: 546479 - RNA, 32 nt, Human
uuuggagggaggggaauggaagggcauggaag

SEQ ID NO: 546480 - RNA, 32 nt, Human
uuuggaggggaggcccaacagcaaagauggag

SEQ ID NO: 546481 - RNA, 32 nt, Human
uuuggaggggcaaggggcagaaugacauaguu

SEQ ID NO: 546482 - RNA, 32 nt, Human
uuuggagggggcaggcaaagucaaagugaaug

SEQ ID NO: 546483 - RNA, 32 nt, Human
uuuggaggggguggggaaauaguucuggugcc

SEQ ID NO: 546484 - RNA, 32 nt, Human
uuuggagguguggagaaggggaagggagggac

SEQ ID NO: 546485 - RNA, 32 nt, Human
uuuggaguaagggacuucauauaccugauucc

SEQ ID NO: 546486 - RNA, 24 nt, Human
uuuggaguauuuugguuuuucuua

SEQ ID NO: 546487 - RNA, 32 nt, Human
uuuggaguccugcugucugggugccagggccg

SEQ ID NO: 546488 - RNA, 24 nt, Human
uuuggagucucucaugaaguuuca

SEQ ID NO: 546489 - RNA, 19 nt, Human
uuuggaguggggggcgugg

SEQ ID NO: 546490 - RNA, 32 nt, Human
uuuggaguggucugaagccucugccuccuucc

SEQ ID NO: 546491 - RNA, 32 nt, Human
uuuggaguguccguuauccugccugcauuugg

SEQ ID NO: 546492 - RNA, 22 nt, Human
uuuggaguuccccauucugcca

SEQ ID NO: 546493 - RNA, 22 nt, Human
uuuggauaaccuuccuucuaaa

SEQ ID NO: 546494 - RNA, 32 nt, Human
uuuggauaacuuauaggaaagccuagaaccuc

SEQ ID NO: 546495 - RNA, 32 nt, Human
uuuggauaagaagagaaaauugaaggagaugu

SEQ ID NO: 546496 - RNA, 32 nt, Human
uuuggauacaauaacaggaccuuaccucacag

SEQ ID NO: 546497 - RNA, 24 nt, Human
uuuggauacuaaggaugugccaaa

SEQ ID NO: 546498 - RNA, 23 nt, Human
uuuggauauuuuaaccuguuaag

SEQ ID NO: 546499 - RNA, 32 nt, Human
uuuggaucaaagaaguguuucucagugaaaug

SEQ ID NO: 546500 - RNA, 32 nt, Human
uuuggaucauagcuuaacaaggcacaggaagg

SEQ ID NO: 546501 - RNA, 32 nt, Human
uuuggaucuaguuucuaaguuauuuuaguguu

SEQ ID NO: 546502 - RNA, 32 nt, Human
uuuggaucuggagcagagucugccauucugcc

SEQ ID NO: 546503 - RNA, 32 nt, Human
uuuggaucuugagacucauccagccugcuaca

SEQ ID NO: 546504 - RNA, 32 nt, Human
uuuggaugaauaaacuuuaugccuaaaacaua

SEQ ID NO: 546505 - RNA, 32 nt, Human
uuuggaugaugauuuggcaagaugcuguaagu

SEQ ID NO: 546506 - RNA, 24 nt, Human
uuuggaugccuccuaugccuggcg

SEQ ID NO: 546507 - RNA, 22 nt, Human
uuuggaugcugugugccuguca

SEQ ID NO: 546508 - RNA, 24 nt, Human
uuuggaugcugugugccugucaag

SEQ ID NO: 546509 - RNA, 26 nt, Human
uuuggaugcuuuuuauacguucucca

SEQ ID NO: 546510 - RNA, 32 nt, Human
uuuggauggaguuucguuuugucgcccaggcu

SEQ ID NO: 546511 - RNA, 21 nt, Human
uuuggauggccaucuccugcu

SEQ ID NO: 546512 - RNA, 19 nt, Human
uuuggauggggaaagggaa

SEQ ID NO: 546513 - RNA, 32 nt, Human
uuuggauggggaagggaaagacuggggaggga

SEQ ID NO: 546514 - RNA, 32 nt, Human
uuuggauggggagggggagcuucugagaaucg

SEQ ID NO: 546515 - RNA, 22 nt, Human
uuuggaugguggggggaugcag

SEQ ID NO: 546516 - RNA, 32 nt, Human
uuuggaugucaugugacccugugccucaguuu

SEQ ID NO: 546517 - RNA, 32 nt, Human
uuuggauguccaaaagcaccagaaggagggug

SEQ ID NO: 546518 - RNA, 32 nt, Human
uuuggaugucccuucccuagggggaaaggcug

SEQ ID NO: 546519 - RNA, 22 nt, Human
uuuggaugucugggcccugcca

SEQ ID NO: 546520 - RNA, 20 nt, Human
uuuggaugugcuuucugcca

SEQ ID NO: 546521 - RNA, 32 nt, Human
uuuggauguggaaguaaaagugcugcuaaaac

SEQ ID NO: 546522 - RNA, 32 nt, Human
uuuggauuagggauuguuuucucacuuaccuu

SEQ ID NO: 546523 - RNA, 32 nt, Human
uuuggauucccugauauguuccuucaaaucug

SEQ ID NO: 546524 - RNA, 32 nt, Human
uuuggauugcagcauucugcucuucugaugau

SEQ ID NO: 546525 - RNA, 32 nt, Human
uuuggauugcccucuuucaauuuccuugugaa

SEQ ID NO: 546526 - RNA, 32 nt, Human
uuuggauuguguccucugcagcuuuugauaug

SEQ ID NO: 546527 - RNA, 32 nt, Human
uuuggauuuauucaaaguacuaugggaaucca

SEQ ID NO: 546528 - RNA, 32 nt, Human
uuuggauuucucaucaugcaauagcaaaguca

SEQ ID NO: 546529 - RNA, 32 nt, Human
uuuggauuuugaaaagaaaacuuuccucccuc

SEQ ID NO: 546530 - RNA, 32 nt, Human
uuuggcaaacagcaaugaucuuccaauaaaag

SEQ ID NO: 546531 - RNA, 32 nt, Human
uuuggcaaaccaggagcucagcugcaggaggc

SEQ ID NO: 546532 - RNA, 32 nt, Human
uuuggcaaaggagugugaguuuuggggaagcu

SEQ ID NO: 546533 - RNA, 32 nt, Human
uuuggcaacuccugggccacacggccugccuc

SEQ ID NO: 546534 - RNA, 32 nt, Human
uuuggcaauggaagaagauuaguauuagagga

SEQ ID NO: 546535 - RNA, 32 nt, Human
uuuggcacagccgcgccacgcgaucggcgauc

SEQ ID NO: 546536 - RNA, 32 nt, Human
uuuggcacaguucaucacuccaguuuguuacu

SEQ ID NO: 546537 - RNA, 32 nt, Human
uuuggcacuggcaucaguguaaagggcucugc

SEQ ID NO: 546538 - RNA, 32 nt, Human
uuuggcagaacagucacuguccuuguaaaguu

SEQ ID NO: 546539 - RNA, 32 nt, Human
uuuggcagacaggucagagaccacugaagaac

SEQ ID NO: 546540 - RNA, 32 nt, Human
uuuggcagccaaguggauggaacuaacuuucc

SEQ ID NO: 546541 - RNA, 32 nt, Human
uuuggcagccaggugacccacacucuggacag

SEQ ID NO: 546542 - RNA, 32 nt, Human
uuuggcagcuccucaucucucuucuaauccac

SEQ ID NO: 546543 - RNA, 21 nt, Human
uuuggcagcuuggugggcgua

SEQ ID NO: 546544 - RNA, 19 nt, Human
uuuggcaggcaggugccag

SEQ ID NO: 546545 - RNA, 32 nt, Human
uuuggcagggccugagaagauggucugacuuc

SEQ ID NO: 546546 - RNA, 32 nt, Human
uuuggcagggccugggccaucccugggacaaa

SEQ ID NO: 546547 - RNA, 23 nt, Human
uuuggcaggugucgggggcgcag

SEQ ID NO: 546548 - RNA, 32 nt, Human
uuuggcaguauuucuuuacaaauguggcaaag

SEQ ID NO: 546549 - RNA, 32 nt, Human
uuuggcagucugaugcagagccugcacucugg

SEQ ID NO: 546550 - RNA, 19 nt, Human
uuuggcagugaggucguag

SEQ ID NO: 546551 - RNA, 32 nt, Human
uuuggcaguuaagcagugccacacuacagggu

SEQ ID NO: 546552 - RNA, 32 nt, Human
uuuggcaguucugccaggcaagcccuguguuc

SEQ ID NO: 546553 - RNA, 32 nt, Human
uuuggcauagccuguguuugcagugagaguga

SEQ ID NO: 546554 - RNA, 32 nt, Human
uuuggcauccccagcaucaccacucucccaac

SEQ ID NO: 546555 - RNA, 32 nt, Human
uuuggcaucuguucccuggcugugccaagaug

SEQ ID NO: 546556 - RNA, 23 nt, Human
uuuggcauguucccauuuuugcu

SEQ ID NO: 546557 - RNA, 32 nt, Human
uuuggccaaaacagaacaaaugcugaaaagga

SEQ ID NO: 546558 - RNA, 32 nt, Human
uuuggccaaugccuauaaaaugcccauuucga

SEQ ID NO: 546559 - RNA, 32 nt, Human
uuuggccacaagaauaagcagcaaauaaacaa

SEQ ID NO: 546560 - RNA, 22 nt, Human
uuuggccacacaguggcacugg

SEQ ID NO: 546561 - RNA, 32 nt, Human
uuuggccacaggccuguguuccugggcugaug

SEQ ID NO: 546562 - RNA, 32 nt, Human
uuuggccagcagaaagagaguaggccggaugu

SEQ ID NO: 546563 - RNA, 22 nt, Human
uuuggccaggcccuggcacuga

SEQ ID NO: 546564 - RNA, 32 nt, Human
uuuggccagguggacuguggcagaucaauaaa

SEQ ID NO: 546565 - RNA, 21 nt, Human
uuuggccaguccccacuccca

SEQ ID NO: 546566 - RNA, 21 nt, Human
uuuggccaucaaaccacccca

SEQ ID NO: 546567 - RNA, 21 nt, Human
uuuggccaucccaccuauccc

SEQ ID NO: 546568 - RNA, 32 nt, Human
uuuggccauugauauucaacaggucacugacc

SEQ ID NO: 546569 - RNA, 32 nt, Human
uuuggccauuuccaccuggugaagauuuucau

SEQ ID NO: 546570 - RNA, 28 nt, Human
uuuggcccaaguguggccccauuagcga

SEQ ID NO: 546571 - RNA, 32 nt, Human
uuuggcccaaguuugggcaacauuuggcccaa

SEQ ID NO: 546572 - RNA, 32 nt, Human
uuuggcccagcacccacccugccagggaggaa

SEQ ID NO: 546573 - RNA, 32 nt, Human
uuuggcccagccuguacuggugugccgcaaug

SEQ ID NO: 546574 - RNA, 32 nt, Human
uuuggccccaacccacacaggccaaugcaaga

SEQ ID NO: 546575 - RNA, 32 nt, Human
uuuggccccucccaggccaucagucugcacuu

SEQ ID NO: 546576 - RNA, 32 nt, Human
uuuggcccuucaucuauuuaaucauagcuaca

SEQ ID NO: 546577 - RNA, 25 nt, Human
uuuggccuagagguguggagugaga

SEQ ID NO: 546578 - RNA, 32 nt, Human
uuuggccuccaacugggcaccaugagggccug

SEQ ID NO: 546579 - RNA, 32 nt, Human
uuuggccugcagauggacugccuggccagagg

SEQ ID NO: 546580 - RNA, 32 nt, Human
uuuggccugcucacccgaccagccugggccgc

SEQ ID NO: 546581 - RNA, 32 nt, Human
uuuggccugcucaugaccuccaccccugagau

SEQ ID NO: 546582 - RNA, 32 nt, Human
uuuggccuggagaagggagggcgggcuagaag

SEQ ID NO: 546583 - RNA, 32 nt, Human
uuuggccugggagguccaggcugcaaugagcc

SEQ ID NO: 546584 - RNA, 32 nt, Human
uuuggccugguguggacggaaaggguggccaa

SEQ ID NO: 546585 - RNA, 32 nt, Human
uuuggccuuaguuccagguagauuaaaaagcu

SEQ ID NO: 546586 - RNA, 32 nt, Human
uuuggccuuucacuucugccuucuguugagaa

SEQ ID NO: 546587 - RNA, 26 nt, Human
uuuggccuuuccucuuugucuuucca

SEQ ID NO: 546588 - RNA, 24 nt, Human
uuuggccuuugugagggagcgagg

SEQ ID NO: 546589 - RNA, 32 nt, Human
uuuggcgagacagggucucacucuguuaccca

SEQ ID NO: 546590 - RNA, 32 nt, Human
uuuggcgagggcccuugaucaccuugccccuc

SEQ ID NO: 546591 - RNA, 20 nt, Human
uuuggcgggaggggaagugg

SEQ ID NO: 546592 - RNA, 20 nt, Human
uuuggcgggcuggggagcgg

SEQ ID NO: 546593 - RNA, 32 nt, Human
uuuggcgggguuuccucaucuccccagccuga

SEQ ID NO: 546594 - RNA, 32 nt, Human
uuuggcgucagaaguccuuaccucuuuauauu

SEQ ID NO: 546595 - RNA, 32 nt, Human
uuuggcgucccaguccugccucugcuccugcc

SEQ ID NO: 546596 - RNA, 32 nt, Human
uuuggcuaaauguauuggcacgauuauuagaa

SEQ ID NO: 546597 - RNA, 32 nt, Human
uuuggcuaagaauguuguuaccaucuucuuug

SEQ ID NO: 546598 - RNA, 32 nt, Human
uuuggcuacuuccagcaggauaccaaggguuu

SEQ ID NO: 546599 - RNA, 32 nt, Human
uuuggcuauggguggagggugaguuugaagag

SEQ ID NO: 546600 - RNA, 32 nt, Human
uuuggcuauggugaguaauacugcuauggaua

SEQ ID NO: 546601 - RNA, 32 nt, Human
uuuggcuauuaaagauauguauuagauggucu

SEQ ID NO: 546602 - RNA, 29 nt, Human
uuuggcuauuccgguuauccuaccuacaa

SEQ ID NO: 546603 - RNA, 32 nt, Human
uuuggcuauuuauuaaccucucuuucauauuc

SEQ ID NO: 546604 - RNA, 32 nt, Human
uuuggcucaaguccauuuggcuguagugucaa

SEQ ID NO: 546605 - RNA, 32 nt, Human
uuuggcucaccuuguaucagcaaacaaaguac

SEQ ID NO: 546606 - RNA, 32 nt, Human
uuuggcucacugcaaccuccaccucccagguu

SEQ ID NO: 546607 - RNA, 32 nt, Human
uuuggcucacugcaaccuccgccuccgggguu

SEQ ID NO: 546608 - RNA, 32 nt, Human
uuuggcucacugcaaccuccgccuucuggguu

SEQ ID NO: 546609 - RNA, 32 nt, Human
uuuggcucacugcaagcucugccucccggguu

SEQ ID NO: 546610 - RNA, 32 nt, Human
uuuggcucacugcagccuccgccuucuggguu

SEQ ID NO: 546611 - RNA, 32 nt, Human
uuuggcucacugcagccucugccucccaggcu

SEQ ID NO: 546612 - RNA, 32 nt, Human
uuuggcucaggccugugaucccagcacuuugg

SEQ ID NO: 546613 - RNA, 32 nt, Human
uuuggcucaugugauccucccaucucagccuc

SEQ ID NO: 546614 - RNA, 32 nt, Human
uuuggcucccaggcuggaguccagugguguga

SEQ ID NO: 546615 - RNA, 32 nt, Human
uuuggcuccucuaguaagaugcacugaaaacu

SEQ ID NO: 546616 - RNA, 32 nt, Human
uuuggcucguaacaguuucagcuuucuuguua

SEQ ID NO: 546617 - RNA, 32 nt, Human
uuuggcucuaggaaggcuuccaugcagugaca

SEQ ID NO: 546618 - RNA, 32 nt, Human
uuuggcucucccucacucucugaggcuccagc

SEQ ID NO: 546619 - RNA, 32 nt, Human
uuuggcucuccucagaagaaagaaucuuucca

SEQ ID NO: 546620 - RNA, 32 nt, Human
uuuggcucucucaccagcaccauggcuguugg

SEQ ID NO: 546621 - RNA, 32 nt, Human
uuuggcucucugccuucucuucauguuggccu

SEQ ID NO: 546622 - RNA, 32 nt, Human
uuuggcucugcuaccugcuccugaagccccgc

SEQ ID NO: 546623 - RNA, 32 nt, Human
uuuggcucuguuuugcuauauccccuaauuug

SEQ ID NO: 546624 - RNA, 25 nt, Human
uuuggcucuucuuuguuuugucuca

SEQ ID NO: 546625 - RNA, 32 nt, Human
uuuggcucuuucucccccgcaaggacccgcug

SEQ ID NO: 546626 - RNA, 32 nt, Human
uuuggcugaacaaaugaguaguggcuucagug

SEQ ID NO: 546627 - RNA, 32 nt, Human
uuuggcugaacuguccuuucucaacagaagcg

SEQ ID NO: 546628 - RNA, 32 nt, Human
uuuggcugacucuucaagaaugccauucaaca

SEQ ID NO: 546629 - RNA, 32 nt, Human
uuuggcugcacuguuaccugcacagagaagag

SEQ ID NO: 546630 - RNA, 32 nt, Human
uuuggcugcagaguggccuggccaacucacac

SEQ ID NO: 546631 - RNA, 31 nt, Human
uuuggcugccauuuuuagcuaccucaaagga

SEQ ID NO: 546632 - RNA, 32 nt, Human
uuuggcugcccaggcucgccuugacuccaaau

SEQ ID NO: 546633 - RNA, 31 nt, Human
uuuggcugccucugucggucuguucaguuac

SEQ ID NO: 546634 - RNA, 18 nt, Human
uuuggcugcgggugcaaa

SEQ ID NO: 546635 - RNA, 32 nt, Human
uuuggcugcucuccaucucuuguaccagccca

SEQ ID NO: 546636 - RNA, 32 nt, Human
uuuggcuggacccaaaagauccagugugguca

SEQ ID NO: 546637 - RNA, 32 nt, Human
uuuggcuggacccagaguccgcguggaaccgc

SEQ ID NO: 546638 - RNA, 32 nt, Human
uuuggcuggagcacuuguguccaugcauguac

SEQ ID NO: 546639 - RNA, 21 nt, Human
uuuggcuggggaggggggcag

SEQ ID NO: 546640 - RNA, 32 nt, Human
uuuggcugucacucccugugcauggucugacc

SEQ ID NO: 546641 - RNA, 32 nt, Human
uuuggcugugacuggguggggcagcaugcagc

SEQ ID NO: 546642 - RNA, 32 nt, Human
uuuggcuuaacuuucugccauugacuuugggu

SEQ ID NO: 546643 - RNA, 21 nt, Human
uuuggcuuauuuuccauccca

SEQ ID NO: 546644 - RNA, 32 nt, Human
uuuggcuuccaaugcuauugcugcaugcugaa

SEQ ID NO: 546645 - RNA, 32 nt, Human
uuuggcuuccugaaccuuucugcccccacuuu

SEQ ID NO: 546646 - RNA, 32 nt, Human
uuuggcuuccuucucacauuucuuuagcuuug

SEQ ID NO: 546647 - RNA, 32 nt, Human
uuuggcuucuaggaacaguugacuucccagaa

SEQ ID NO: 546648 - RNA, 32 nt, Human
uuuggcuucucagcaggcagcugacugaggag

SEQ ID NO: 546649 - RNA, 32 nt, Human
uuuggcuucuguacuggcugaggacaggggag

SEQ ID NO: 546650 - RNA, 32 nt, Human
uuuggcuugagauuuaaaauuauaacugauaa

SEQ ID NO: 546651 - RNA, 22 nt, Human
uuuggcuuuaaagguaagccug

SEQ ID NO: 546652 - RNA, 32 nt, Human
uuuggcuuucaucgcuuuuucuacauguuuuu

SEQ ID NO: 546653 - RNA, 32 nt, Human
uuuggcuuuugauuugcccuguguucuccuga

SEQ ID NO: 546654 - RNA, 32 nt, Human
uuugggaaagagacaggaaagauucacuugaa

SEQ ID NO: 546655 - RNA, 21 nt, Human
uuugggaaaggcuugcagugg

SEQ ID NO: 546656 - RNA, 32 nt, Human
uuugggaaaggggaaagagagcauggaggggu

SEQ ID NO: 546657 - RNA, 32 nt, Human
uuugggaacuccuuuccaaagccauauuuuug

SEQ ID NO: 546658 - RNA, 22 nt, Human
uuugggaacucugucuuucuca

SEQ ID NO: 546659 - RNA, 32 nt, Human
uuugggaagaggagaaaguucuggagaggaug

SEQ ID NO: 546660 - RNA, 32 nt, Human
uuugggaaggagcgugucuggccagguucugc

SEQ ID NO: 546661 - RNA, 32 nt, Human
uuugggaagguaaagaaagaaggaaggaggga

SEQ ID NO: 546662 - RNA, 32 nt, Human
uuugggaagucccgggagcagcgcggcggcac

SEQ ID NO: 546663 - RNA, 32 nt, Human
uuugggaaguggaggugggagaaucacuugag

SEQ ID NO: 546664 - RNA, 32 nt, Human
uuugggaagugggugaggcugggcagggccug

SEQ ID NO: 546665 - RNA, 32 nt, Human
uuugggaauucuacuggcaaggguugagucuu

SEQ ID NO: 546666 - RNA, 32 nt, Human
uuugggaccagcccgggcaacauagcaagacc

SEQ ID NO: 546667 - RNA, 24 nt, Human
uuugggaccagccugaccaacaug

SEQ ID NO: 546668 - RNA, 32 nt, Human
uuugggaccagccugaccaacauggugaaaua

SEQ ID NO: 546669 - RNA, 22 nt, Human
uuugggaccagccuggccaaca

SEQ ID NO: 546670 - RNA, 24 nt, Human
uuugggaccagccuggccaacaug

SEQ ID NO: 546671 - RNA, 32 nt, Human
uuugggaccagccuggccaacauggugaaacc

SEQ ID NO: 546672 - RNA, 24 nt, Human
uuugggaccagccugggcaacaua

SEQ ID NO: 546673 - RNA, 32 nt, Human
uuugggaccagccugggcaacauagggggauc

SEQ ID NO: 546674 - RNA, 24 nt, Human
uuugggaccagccugggcuauaua

SEQ ID NO: 546675 - RNA, 32 nt, Human
uuugggaccagccugggcuauauagcaagacc

SEQ ID NO: 546676 - RNA, 32 nt, Human
uuugggaccauggagcgguaccuaaaacagau

SEQ ID NO: 546677 - RNA, 32 nt, Human
uuugggaccccacacacuccaggugggaucag

SEQ ID NO: 546678 - RNA, 32 nt, Human
uuugggaccccagccugcuggaggcugucaag

SEQ ID NO: 546679 - RNA, 32 nt, Human
uuugggaccgaugggugcuggggaggaucccc

SEQ ID NO: 546680 - RNA, 32 nt, Human
uuugggacuauuccaccuccuuccccugagcc

SEQ ID NO: 546681 - RNA, 32 nt, Human
uuugggacugccccggcaacuccagggugucu

SEQ ID NO: 546682 - RNA, 32 nt, Human
uuugggacugucuugagaaaacagauaaugau

SEQ ID NO: 546683 - RNA, 32 nt, Human
uuugggagauccuggaaaagaucccuucaguu

SEQ ID NO: 546684 - RNA, 32 nt, Human
uuugggagauggauugcuugagcucgggaaga

SEQ ID NO: 546685 - RNA, 32 nt, Human
uuugggagcacaccugcuuugccuugcugccu

SEQ ID NO: 546686 - RNA, 32 nt, Human
uuugggagcagacagaccagagccaccagcca

SEQ ID NO: 546687 - RNA, 32 nt, Human
uuugggagcaguuggcuucugguuuuaaacac

SEQ ID NO: 546688 - RNA, 32 nt, Human
uuugggagcucaauacaaagaugccagcauga

SEQ ID NO: 546689 - RNA, 32 nt, Human
uuugggaggaacuagggucagaaugauguggu

SEQ ID NO: 546690 - RNA, 32 nt, Human
uuugggaggagguggcauuggaaauagcagag

SEQ ID NO: 546691 - RNA, 32 nt, Human
uuugggaggccaagacaggugcaucaguugag

SEQ ID NO: 546692 - RNA, 32 nt, Human
uuugggaggccaaggcgguggaucacaaaguc

SEQ ID NO: 546693 - RNA, 22 nt, Human
uuugggaggccagugcaggugg

SEQ ID NO: 546694 - RNA, 32 nt, Human
uuugggaggccgagacaggcagaucacaaggu

SEQ ID NO: 546695 - RNA, 32 nt, Human
uuugggaggccgagacaggcagauugcccgag

SEQ ID NO: 546696 - RNA, 32 nt, Human
uuugggaggccgaggcagguggaugacaaggu

SEQ ID NO: 546697 - RNA, 32 nt, Human
uuugggaggcgaggcagguagaucaugagguc

SEQ ID NO: 546698 - RNA, 32 nt, Human
uuugggaggcggaggcaggcggguugcuugag

SEQ ID NO: 546699 - RNA, 21 nt, Human
uuugggaggcggaggcgggug

SEQ ID NO: 546700 - RNA, 22 nt, Human
uuugggaggcggaggcgggugg

SEQ ID NO: 546701 - RNA, 22 nt, Human
uuugggaggcggaggugagcag

SEQ ID NO: 546702 - RNA, 32 nt, Human
uuugggaggcugagacaggcagaucacuugag

SEQ ID NO: 546703 - RNA, 32 nt, Human
uuugggaggcugaggggguggaucaccugagg

SEQ ID NO: 546704 - RNA, 22 nt, Human
uuugggaggcugaguugggugg

SEQ ID NO: 546705 - RNA, 32 nt, Human
uuugggagggcaagacagggaggaggccgcuu

SEQ ID NO: 546706 - RNA, 32 nt, Human
uuugggagggggaggcaggcagaucacgacgu

SEQ ID NO: 546707 - RNA, 32 nt, Human
uuugggagggggaggcaggcagaucacgaugu

SEQ ID NO: 546708 - RNA, 32 nt, Human
uuugggagggugagacacugcacagaagacag

SEQ ID NO: 546709 - RNA, 26 nt, Human
uuugggaggucaguuguucuaccuca

SEQ ID NO: 546710 - RNA, 22 nt, Human
uuugggagguggaggcgggugg

SEQ ID NO: 546711 - RNA, 32 nt, Human
uuugggagguggaggugggcggaucacgugag

SEQ ID NO: 546712 - RNA, 32 nt, Human
uuugggaggugggguuuugccauguugcccag

SEQ ID NO: 546713 - RNA, 32 nt, Human
uuugggagucugagacaggcagaucaccugag

SEQ ID NO: 546714 - RNA, 32 nt, Human
uuugggauaagaagggacaaggugcuucuagc

SEQ ID NO: 546715 - RNA, 32 nt, Human
uuugggaucagccuggccaaugugguaaaacc

SEQ ID NO: 546716 - RNA, 32 nt, Human
uuugggaucuugaaucaggaagcugauucaag

SEQ ID NO: 546717 - RNA, 32 nt, Human
uuugggauuaaaacugucaagacuggauaggu

SEQ ID NO: 546718 - RNA, 32 nt, Human
uuugggauuucucucugucauccuggucgacg

SEQ ID NO: 546719 - RNA, 32 nt, Human
uuugggauuuuccuccucuuaacuuucuuaau

SEQ ID NO: 546720 - RNA, 32 nt, Human
uuugggauuuugagagccuucaucucaauuuc

SEQ ID NO: 546721 - RNA, 32 nt, Human
uuugggcaacauggcgaaacccugccucuaca

SEQ ID NO: 546722 - RNA, 32 nt, Human
uuugggcaccuaaugaaaaagacauggaggcc

SEQ ID NO: 546723 - RNA, 32 nt, Human
uuugggcacugucuuuuuaagagaccaaggca

SEQ ID NO: 546724 - RNA, 32 nt, Human
uuugggcagacccugagcagaauacuggucuc

SEQ ID NO: 546725 - RNA, 32 nt, Human
uuugggcagccuugccuccagagagcagauuc

SEQ ID NO: 546726 - RNA, 32 nt, Human
uuugggccaagaaggagagggagaaaggcccg

SEQ ID NO: 546727 - RNA, 32 nt, Human
uuugggccacugcaaagauuccagccuggguc

SEQ ID NO: 546728 - RNA, 32 nt, Human
uuugggccacugcacucuagccuggcaacaga

SEQ ID NO: 546729 - RNA, 32 nt, Human
uuugggccagaacuuccuauuucacuccagca

SEQ ID NO: 546730 - RNA, 32 nt, Human
uuugggccagaggcagccucugcacucccacg

SEQ ID NO: 546731 - RNA, 32 nt, Human
uuugggccagggcagaggaugaggcuggcagc

SEQ ID NO: 546732 - RNA, 32 nt, Human
uuugggccaugcaugcaaagucaaaguuuaaa

SEQ ID NO: 546733 - RNA, 32 nt, Human
uuugggccccggagguagagguugcagugagc

SEQ ID NO: 546734 - RNA, 32 nt, Human
uuugggccucacgugcagacccugccaugcag

SEQ ID NO: 546735 - RNA, 32 nt, Human
uuugggccucagguauccaaagagcacauuuu

SEQ ID NO: 546736 - RNA, 32 nt, Human
uuugggcggggccauccagccuuggcaaggcc

SEQ ID NO: 546737 - RNA, 32 nt, Human
uuugggcuagaagugaggagaaucccuaaacu

SEQ ID NO: 546738 - RNA, 32 nt, Human
uuugggcuagaggcaggaaggaagugggauga

SEQ ID NO: 546739 - RNA, 32 nt, Human
uuugggcuccauccccaccccugcucacuucc

SEQ ID NO: 546740 - RNA, 32 nt, Human
uuugggcuccuaugauaaucuaaugccacugc

SEQ ID NO: 546741 - RNA, 32 nt, Human
uuugggcugcaagugcucacagcucuuguucu

SEQ ID NO: 546742 - RNA, 32 nt, Human
uuugggcuuaguauuucucaggaagagcuaug

SEQ ID NO: 546743 - RNA, 32 nt, Human
uuuggggaaaggacagggugcuagugaguacu

SEQ ID NO: 546744 - RNA, 32 nt, Human
uuuggggaagaacucuacaaaagggaaauguc

SEQ ID NO: 546745 - RNA, 32 nt, Human
uuuggggaaggugauuugugggagacucuagu

SEQ ID NO: 546746 - RNA, 32 nt, Human
uuuggggaauuauuugagaaagcaaaacaaaa

SEQ ID NO: 546747 - RNA, 32 nt, Human
uuuggggacucaauaaacccucacugacuuuu

SEQ ID NO: 546748 - RNA, 32 nt, Human
uuuggggagaccgaggcuggcagaucacuuaa

SEQ ID NO: 546749 - RNA, 32 nt, Human
uuuggggagagggaggggagagaccacagccg

SEQ ID NO: 546750 - RNA, 32 nt, Human
uuuggggagccugucucuccagaagccuuucu

SEQ ID NO: 546751 - RNA, 32 nt, Human
uuuggggagggagggggaagccuuuauucuuu

SEQ ID NO: 546752 - RNA, 32 nt, Human
uuuggggagggcccugaggaccuggccccggg

SEQ ID NO: 546753 - RNA, 32 nt, Human
uuuggggaggggcuggaggacuuccgcacgcu

SEQ ID NO: 546754 - RNA, 32 nt, Human
uuuggggagggggagaaagaagaaagggauug

SEQ ID NO: 546755 - RNA, 32 nt, Human
uuuggggauaaauaaguuagagcauaucuaaa

SEQ ID NO: 546756 - RNA, 32 nt, Human
uuuggggauagggucccugaagaagucacuca

SEQ ID NO: 546757 - RNA, 32 nt, Human
uuuggggaucaagaacuguaaauuuauguauc

SEQ ID NO: 546758 - RNA, 32 nt, Human
uuuggggauguggagguaguuggguagaaaaa

SEQ ID NO: 546759 - RNA, 21 nt, Human
uuuggggccacuguaggggua

SEQ ID NO: 546760 - RNA, 32 nt, Human
uuuggggccauggaagauuggaaacaaagauu

SEQ ID NO: 546761 - RNA, 32 nt, Human
uuuggggcuaaagacugaucucaggggucuua

SEQ ID NO: 546762 - RNA, 32 nt, Human
uuuggggcucuaucgcgcaucucuccuaccaa

SEQ ID NO: 546763 - RNA, 32 nt, Human
uuuggggcugaaaugagugauccugccucugg

SEQ ID NO: 546764 - RNA, 32 nt, Human
uuuggggcugggcugguucuccacccucgcag

SEQ ID NO: 546765 - RNA, 20 nt, Human
uuuggggcuuuuauuucuca

SEQ ID NO: 546766 - RNA, 32 nt, Human
uuugggggaaacugaggcaguggggaagacag

SEQ ID NO: 546767 - RNA, 32 nt, Human
uuugggggaacuaguggcauggggucagggag

SEQ ID NO: 546768 - RNA, 32 nt, Human
uuugggggagagagcagggaguggcucaggga

SEQ ID NO: 546769 - RNA, 19 nt, Human
uuugggggagugggcgcag

SEQ ID NO: 546770 - RNA, 32 nt, Human
uuugggggaucaagggaagagauggaacucuu

SEQ ID NO: 546771 - RNA, 32 nt, Human
uuugggggcagccauccuccaccagaaagggg

SEQ ID NO: 546772 - RNA, 24 nt, Human
uuugggggcagggagguugggugg

SEQ ID NO: 546773 - RNA, 32 nt, Human
uuugggggcagugagagagagcuggaaagggg

SEQ ID NO: 546774 - RNA, 32 nt, Human
uuugggggccgaggcggguggaucaccugagg

SEQ ID NO: 546775 - RNA, 32 nt, Human
uuugggggcuccaggacuacaguagaaaagua

SEQ ID NO: 546776 - RNA, 32 nt, Human
uuugggggcuggcuacauugcuggugggauua

SEQ ID NO: 546777 - RNA, 32 nt, Human
uuugggggcuguaugacguacuggucgguagu

SEQ ID NO: 546778 - RNA, 19 nt, Human
uuuggggggaggggggugg

SEQ ID NO: 546779 - RNA, 18 nt, Human
uuuggggggagggggugu

SEQ ID NO: 546780 - RNA, 24 nt, Human
uuuggggggccaguaguucaguga

SEQ ID NO: 546781 - RNA, 23 nt, Human
uuugggggguggaguuucaguga

SEQ ID NO: 546782 - RNA, 32 nt, Human
uuugggggucccuuuugugucucccccgccau

SEQ ID NO: 546783 - RNA, 32 nt, Human
uuugggggugcuaauccaggacagcauuacac

SEQ ID NO: 546784 - RNA, 32 nt, Human
uuugggggugggccuaucugggugcauuaugg

SEQ ID NO: 546785 - RNA, 20 nt, Human
uuuggggguggggguugcgg

SEQ ID NO: 546786 - RNA, 32 nt, Human
uuuggggguuggucagcaacuuugagugccau

SEQ ID NO: 546787 - RNA, 23 nt, Human
uuugggguaagaaaacaaacaug

SEQ ID NO: 546788 - RNA, 32 nt, Human
uuugggguaugggagagaagagaaugcacaaa

SEQ ID NO: 546789 - RNA, 32 nt, Human
uuugggguauuaagaguacugcaguccgaaac

SEQ ID NO: 546790 - RNA, 32 nt, Human
uuuggggucccagagccugcucugugcacuga

SEQ ID NO: 546791 - RNA, 32 nt, Human
uuugggguccuagcccagugcuucuccaacac

SEQ ID NO: 546792 - RNA, 32 nt, Human
uuuggggucucaaagaagcaguggccaccacc

SEQ ID NO: 546793 - RNA, 32 nt, Human
uuuggggucugaggagaaacaggcuggggccu

SEQ ID NO: 546794 - RNA, 32 nt, Human
uuuggggucugccugggggaggaggggagaaa

SEQ ID NO: 546795 - RNA, 32 nt, Human
uuuggggugaguaggcuucaauucccagcucu

SEQ ID NO: 546796 - RNA, 32 nt, Human
uuuggggugauagcacuuucaggcaggagcua

SEQ ID NO: 546797 - RNA, 18 nt, Human
uuuggggugggggcgggg

SEQ ID NO: 546798 - RNA, 32 nt, Human
uuuggggugugggcagcacccugaacaaaacu

SEQ ID NO: 546799 - RNA, 32 nt, Human
uuuggggugugggcagcgcccugaacaagacu

SEQ ID NO: 546800 - RNA, 24 nt, Human
uuugggguuggggaaagggccccu

SEQ ID NO: 546801 - RNA, 21 nt, Human
uuugggguuucuuuguccuca

SEQ ID NO: 546802 - RNA, 24 nt, Human
uuugggguuuuuguugccuuuuuu

SEQ ID NO: 546803 - RNA, 32 nt, Human
uuuggguaaugugaaucagugccugaggaccu

SEQ ID NO: 546804 - RNA, 32 nt, Human
uuuggguacauucucauugaauuuccuucaaa

SEQ ID NO: 546805 - RNA, 32 nt, Human
uuuggguacuuucuuuucuuccugccguucuu

SEQ ID NO: 546806 - RNA, 32 nt, Human
uuuggguagcuauugucaacugccuucccaug

SEQ ID NO: 546807 - RNA, 27 nt, Human
uuuggguaucugcuuucauuccugaca

SEQ ID NO: 546808 - RNA, 32 nt, Human
uuuggguauuugcacuauuuugggagcaaguu

SEQ ID NO: 546809 - RNA, 32 nt, Human
uuugggucacugcagaucucugagucccccuu

SEQ ID NO: 546810 - RNA, 32 nt, Human
uuugggucauguuuuuaaccaccuggcaauac

SEQ ID NO: 546811 - RNA, 20 nt, Human
uuugggucccugucuuucuc

SEQ ID NO: 546812 - RNA, 32 nt, Human
uuugggucccugucuuucucugagccugucuc

SEQ ID NO: 546813 - RNA, 32 nt, Human
uuuggguccugcagagcugggcucaggcccug

SEQ ID NO: 546814 - RNA, 32 nt, Human
uuugggucuccaggauccucauggaaggggaa

SEQ ID NO: 546815 - RNA, 32 nt, Human
uuugggucucccauacugcguauagaugaaug

SEQ ID NO: 546816 - RNA, 32 nt, Human
uuugggucucguugcuucaugguauggucugg

SEQ ID NO: 546817 - RNA, 32 nt, Human
uuugggucucuuagaccuuaccucucaacucc

SEQ ID NO: 546818 - RNA, 32 nt, Human
uuugggucucuuggaggcuaggguucuguggc

SEQ ID NO: 546819 - RNA, 32 nt, Human
uuugggugaagguaaggaaugagggaagagga

SEQ ID NO: 546820 - RNA, 32 nt, Human
uuugggugaccagccacucaaaggaacuuucu

SEQ ID NO: 546821 - RNA, 32 nt, Human
uuugggugcaccuggccugcucuucccauguu

SEQ ID NO: 546822 - RNA, 32 nt, Human
uuugggugcagacaggcacacagggagaacac

SEQ ID NO: 546823 - RNA, 32 nt, Human
uuuggguggacuccagccuccccagcaacaau

SEQ ID NO: 546824 - RNA, 32 nt, Human
uuugggugggacucuaagcaguauuugcagaa

SEQ ID NO: 546825 - RNA, 32 nt, Human
uuuggguguccucaccagcaaggcugcucggg

SEQ ID NO: 546826 - RNA, 32 nt, Human
uuugggugucugcugagcaagcacgugaauga

SEQ ID NO: 546827 - RNA, 22 nt, Human
uuugggugucuucuguugguca

SEQ ID NO: 546828 - RNA, 32 nt, Human
uuuggguguggggcaggcagagagggauggug

SEQ ID NO: 546829 - RNA, 32 nt, Human
uuugggugugugugcaugcacauguguguguu

SEQ ID NO: 546830 - RNA, 32 nt, Human
uuuggguguuuucuggggauguuaacauggga

SEQ ID NO: 546831 - RNA, 32 nt, Human
uuuggguuaaggcuggacaucaauuagugagc

SEQ ID NO: 546832 - RNA, 32 nt, Human
uuuggguuaccucccugagucuguaagcaacc

SEQ ID NO: 546833 - RNA, 32 nt, Human
uuuggguuaggaucuucucuccccuaaagcau

SEQ ID NO: 546834 - RNA, 32 nt, Human
uuuggguugcaugccuguaaucccagcauuuu

SEQ ID NO: 546835 - RNA, 32 nt, Human
uuuggguuuauuuggaaaggaaugcaaagaug

SEQ ID NO: 546836 - RNA, 21 nt, Human
uuugguaaauguagacugugc

SEQ ID NO: 546837 - RNA, 22 nt, Human
uuugguaaccgaacuggugcuu

SEQ ID NO: 546838 - RNA, 32 nt, Human
uuugguaaugaguuuacagagagugggucauc

SEQ ID NO: 546839 - RNA, 32 nt, Human
uuugguaccaguaccaugauguuuugguuacu

SEQ ID NO: 546840 - RNA, 32 nt, Human
uuugguaccaguaccaugcuguuuugguuacu

SEQ ID NO: 546841 - RNA, 32 nt, Human
uuugguacucuuaaagcuucaguggccuagca

SEQ ID NO: 546842 - RNA, 32 nt, Human
uuugguacugcaacugcuuuccucuugcccag

SEQ ID NO: 546843 - RNA, 32 nt, Human
uuugguacuuuagaaauguaacuuuuugcucu

SEQ ID NO: 546844 - RNA, 32 nt, Human
uuugguagacgggguuucaccaugugggccag

SEQ ID NO: 546845 - RNA, 32 nt, Human
uuugguagcagcucccugccuccagggcuucc

SEQ ID NO: 546846 - RNA, 19 nt, Human
uuugguaggaaagggucag

SEQ ID NO: 546847 - RNA, 32 nt, Human
uuugguaguauuaauuuuguggucauuguuuc

SEQ ID NO: 546848 - RNA, 32 nt, Human
uuugguagucaguguggccugcucugaaucag

SEQ ID NO: 546849 - RNA, 32 nt, Human
uuugguaucugugugacugcucugugcccauc

SEQ ID NO: 546850 - RNA, 31 nt, Human
uuugguaugagauucucugccaacaccaagc

SEQ ID NO: 546851 - RNA, 32 nt, Human
uuugguauugauuucacagucagcugcucaac

SEQ ID NO: 546852 - RNA, 32 nt, Human
uuuggucaaccaggaccuugauuuuucaggca

SEQ ID NO: 546853 - RNA, 32 nt, Human
uuuggucacacucucaccuaggugagcgcauu

SEQ ID NO: 546854 - RNA, 32 nt, Human
uuuggucacagaggcagauguacagagggaag

SEQ ID NO: 546855 - RNA, 32 nt, Human
uuuggucacccagauaugaguauuaauguugg

SEQ ID NO: 546856 - RNA, 21 nt, Human
uuuggucacuguccuuuuaaa

SEQ ID NO: 546857 - RNA, 32 nt, Human
uuuggucacuuccaagcuagaaggaggaauca

SEQ ID NO: 546858 - RNA, 19 nt, Human
uuuggucagccugcugaca

SEQ ID NO: 546859 - RNA, 32 nt, Human
uuuggucaggaguucaagaccacccuggccaa

SEQ ID NO: 546860 - RNA, 32 nt, Human
uuugguccagccugguuuagccuggauguugc

SEQ ID NO: 546861 - RNA, 32 nt, Human
uuugguccauguccgaguccggccuuuggagu

SEQ ID NO: 546862 - RNA, 32 nt, Human
uuugguccccuaaucccagagcagaaaagaaa

SEQ ID NO: 546863 - RNA, 32 nt, Human
uuuggucccuggcucucccagagggacauggc

SEQ ID NO: 546864 - RNA, 32 nt, Human
uuugguccugccuuccccagagcugcuagcag

SEQ ID NO: 546865 - RNA, 32 nt, Human
uuugguccugcuaguuucuggauuguacaaau

SEQ ID NO: 546866 - RNA, 32 nt, Human
uuugguccuucuguuacccagcuccuggaggc

SEQ ID NO: 546867 - RNA, 32 nt, Human
uuuggucgaaggugccugguuuagugcuguaa

SEQ ID NO: 546868 - RNA, 32 nt, Human
uuuggucgugucguuuguaugaaaaucugagg

SEQ ID NO: 546869 - RNA, 32 nt, Human
uuuggucuagacuaggcuuugggugguuccaa

SEQ ID NO: 546870 - RNA, 32 nt, Human
uuuggucucauaccugcgucuaccuuccaucu

SEQ ID NO: 546871 - RNA, 32 nt, Human
uuuggucucugacuucugcuugauuccacagu

SEQ ID NO: 546872 - RNA, 32 nt, Human
uuuggucucugccuuuucaaauugcaguugaa

SEQ ID NO: 546873 - RNA, 32 nt, Human
uuuggucuguuaccuguuuuccagaaauuugu

SEQ ID NO: 546874 - RNA, 32 nt, Human
uuuggucuguucugugacucucuccccaaaca

SEQ ID NO: 546875 - RNA, 32 nt, Human
uuuggucuguuuuugggaaaaguuuucaagag

SEQ ID NO: 546876 - RNA, 32 nt, Human
uuuggucuuagcacuuuccuucuccagauccc

SEQ ID NO: 546877 - RNA, 32 nt, Human
uuuggucuucuaaaaugggaucaugcccauuu

SEQ ID NO: 546878 - RNA, 22 nt, Human
uuuggugacccugucuuucuua

SEQ ID NO: 546879 - RNA, 32 nt, Human
uuuggugagcagcagcccuggggucacagaca

SEQ ID NO: 546880 - RNA, 23 nt, Human
uuuggugaggggugggggugcgg

SEQ ID NO: 546881 - RNA, 32 nt, Human
uuuggugaguguaagggauucugcaagggaca

SEQ ID NO: 546882 - RNA, 32 nt, Human
uuuggugaugaggacauggaagggcaggcaga

SEQ ID NO: 546883 - RNA, 32 nt, Human
uuuggugaugcuguucuugggucuaccacacc

SEQ ID NO: 546884 - RNA, 23 nt, Human
uuuggugaugcuuauuuuugcca

SEQ ID NO: 546885 - RNA, 32 nt, Human
uuuggugcacacuggagcuacuuggacaagac

SEQ ID NO: 546886 - RNA, 32 nt, Human
uuuggugcagagaaguuagauccugcuaaauu

SEQ ID NO: 546887 - RNA, 32 nt, Human
uuuggugcaguuucagcucacugcaaccuccg

SEQ ID NO: 546888 - RNA, 23 nt, Human
uuuggugcauuuuuaguugggaa

SEQ ID NO: 546889 - RNA, 32 nt, Human
uuuggugcucuauugauuggugagugaccaga

SEQ ID NO: 546890 - RNA, 32 nt, Human
uuuggugcucucuugccuuuagcuaccuucuc

SEQ ID NO: 546891 - RNA, 32 nt, Human
uuuggugcuggguucucacauccaaguguucc

SEQ ID NO: 546892 - RNA, 32 nt, Human
uuugguggaagugggccuugaacacaguguac

SEQ ID NO: 546893 - RNA, 32 nt, Human
uuugguggagccgccagcugacaggacaucuu

SEQ ID NO: 546894 - RNA, 32 nt, Human
uuugguggcaccacugcccuccagccuggaug

SEQ ID NO: 546895 - RNA, 32 nt, Human
uuugguggcaugcaccuguaaucccagcuacu

SEQ ID NO: 546896 - RNA, 32 nt, Human
uuugguggcgcaugcuuguaaucccagcuacu

SEQ ID NO: 546897 - RNA, 32 nt, Human
uuugguggcugaggcaugagaaucacuugaac

SEQ ID NO: 546898 - RNA, 32 nt, Human
uuuggugggcaaguggggcugauggugguguc

SEQ ID NO: 546899 - RNA, 32 nt, Human
uuuggugggcaagugggggugaucuugguguu

SEQ ID NO: 546900 - RNA, 20 nt, Human
uuugguggggcggggggcgg

SEQ ID NO: 546901 - RNA, 32 nt, Human
uuuggugggggcagauggcagggcgacccaaa

SEQ ID NO: 546902 - RNA, 23 nt, Human
uuuggugggguggugggaugcag

SEQ ID NO: 546903 - RNA, 32 nt, Human
uuugguggugcacaccuguagucccagcuacu

SEQ ID NO: 546904 - RNA, 32 nt, Human
uuugguggugcaugccuguaaucccagcuacu

SEQ ID NO: 546905 - RNA, 32 nt, Human
uuugguggugugcgccuguaaucccagcuacu

SEQ ID NO: 546906 - RNA, 32 nt, Human
uuuggugguuaagguuugugauaaagaguuuu

SEQ ID NO: 546907 - RNA, 32 nt, Human
uuugguguauagaaguuuguccauuuguaaaa

SEQ ID NO: 546908 - RNA, 32 nt, Human
uuugguguauuggcaugaagcuacuuacagua

SEQ ID NO: 546909 - RNA, 32 nt, Human
uuuggugucauuauuccaucuucuccauaagu

SEQ ID NO: 546910 - RNA, 32 nt, Human
uuugguguccaugcuuuucacucugaggacau

SEQ ID NO: 546911 - RNA, 29 nt, Human
uuuggugucugaugugugcccagaucguu

SEQ ID NO: 546912 - RNA, 32 nt, Human
uuuggugucuuuuuauaauucgcucgugguca

SEQ ID NO: 546913 - RNA, 32 nt, Human
uuuggugugaucuagcaaaagaguaggaauca

SEQ ID NO: 546914 - RNA, 32 nt, Human
uuuggugugcugcuucccaugcacuacuuuga

SEQ ID NO: 546915 - RNA, 32 nt, Human
uuugguguucgaggagggacaggacagcuggc

SEQ ID NO: 546916 - RNA, 32 nt, Human
uuugguguuggugcuuguaagcauuuucauua

SEQ ID NO: 546917 - RNA, 25 nt, Human
uuugguguugucuugguuuuucuca

SEQ ID NO: 546918 - RNA, 32 nt, Human
uuugguguuuugcuguugagcugguuuuugag

SEQ ID NO: 546919 - RNA, 32 nt, Human
uuugguuaaaucaugccaucugaacagaaaca

SEQ ID NO: 546920 - RNA, 18 nt, Human
uuugguuagucagaguga

SEQ ID NO: 546921 - RNA, 32 nt, Human
uuugguuaguguugaaggugggaagagcauuu

SEQ ID NO: 546922 - RNA, 32 nt, Human
uuugguuaugcugaauuugaggaccuggauuc

SEQ ID NO: 546923 - RNA, 32 nt, Human
uuugguuauuuuucugucaucaaacaaaaaca

SEQ ID NO: 546924 - RNA, 32 nt, Human
uuugguucagaauauuguuugugccaguacau

SEQ ID NO: 546925 - RNA, 32 nt, Human
uuugguuccagaaggaacugucagucaucagc

SEQ ID NO: 546926 - RNA, 32 nt, Human
uuugguucccacucagcuucugccggucggca

SEQ ID NO: 546927 - RNA, 32 nt, Human
uuugguucccuaguuaacuucucuucauccuu

SEQ ID NO: 546928 - RNA, 32 nt, Human
uuugguucucugcugugccugccuguguccug

SEQ ID NO: 546929 - RNA, 22 nt, Human
uuugguucugaagcugguccuu

SEQ ID NO: 546930 - RNA, 21 nt, Human
uuugguugcuuucuugccaaa

SEQ ID NO: 546931 - RNA, 32 nt, Human
uuugguugggggaaggaagaggccaauuucau

SEQ ID NO: 546932 - RNA, 32 nt, Human
uuugguuuacuugucugucaaauguuuccuua

SEQ ID NO: 546933 - RNA, 32 nt, Human
uuugguuucauauugaauaaaucauugccaaa

SEQ ID NO: 546934 - RNA, 32 nt, Human
uuugguuucuuccuuuacuauagaugauugug

SEQ ID NO: 546935 - RNA, 32 nt, Human
uuugguuugguucauggggucucugccuaugg

SEQ ID NO: 546936 - RNA, 32 nt, Human
uuugguuuucaccaccaugacaggacaaugau

SEQ ID NO: 546937 - RNA, 32 nt, Human
uuugguuuucuacuccuccucagccucauaaa

SEQ ID NO: 546938 - RNA, 32 nt, Human
uuugguuuugaaacggagucucgcucugucgc

SEQ ID NO: 546939 - RNA, 31 nt, Human
uuugguuuugagaaaagauggugaaguuucu

SEQ ID NO: 546940 - RNA, 32 nt, Human
uuugguuuuguuccuuucauccugucuguguu

SEQ ID NO: 546941 - RNA, 32 nt, Human
uuugguuuuuguaaacggagaggacaguucuu

SEQ ID NO: 546942 - RNA, 32 nt, Human
uuuguaaaaccauccccuucaccagaauggua

SEQ ID NO: 546943 - RNA, 22 nt, Human
uuuguaaaauaaaaccaccaaa

SEQ ID NO: 546944 - RNA, 23 nt, Human
uuuguaaacauuuuuaguuggaa

SEQ ID NO: 546945 - RNA, 32 nt, Human
uuuguaaaccugcagaacauuuuacuuaaaag

SEQ ID NO: 546946 - RNA, 32 nt, Human
uuuguaaagauaacagagugguggggucaaag

SEQ ID NO: 546947 - RNA, 32 nt, Human
uuuguaaagauuaccuugccacuuuauaagaa

SEQ ID NO: 546948 - RNA, 32 nt, Human
uuuguaaagucauuggauauaaaagagugauu

SEQ ID NO: 546949 - RNA, 32 nt, Human
uuuguaaauaaacgugcucucugaaugccaaa

SEQ ID NO: 546950 - RNA, 32 nt, Human
uuuguaaaucaaguauuacuggaacacaacca

SEQ ID NO: 546951 - RNA, 32 nt, Human
uuuguaaauggacauugaacaaacaaacuacc

SEQ ID NO: 546952 - RNA, 32 nt, Human
uuuguaaauuauauacauguacuacuguacua

SEQ ID NO: 546953 - RNA, 32 nt, Human
uuuguaacaaaggagucuguaacuuuauuuau

SEQ ID NO: 546954 - RNA, 32 nt, Human
uuuguaacaaaugaacgauauguagcagaaag

SEQ ID NO: 546955 - RNA, 32 nt, Human
uuuguaacacaaauaaaugcuugaggagaugg

SEQ ID NO: 546956 - RNA, 32 nt, Human
uuuguaacauacaaaaagaaucugccagaaaa

SEQ ID NO: 546957 - RNA, 23 nt, Human
uuuguaaccagccuggguaacac

SEQ ID NO: 546958 - RNA, 32 nt, Human
uuuguaaccaucauaauacagguguaauaggu

SEQ ID NO: 546959 - RNA, 32 nt, Human
uuuguaacccagagcauguucaauuuuuggaa

SEQ ID NO: 546960 - RNA, 18 nt, Human
uuuguaacccagccacca

SEQ ID NO: 546961 - RNA, 32 nt, Human
uuuguaacuuaguaaagguauuaacuuccuug

SEQ ID NO: 546962 - RNA, 32 nt, Human
uuuguaagcaucuggggagguacugaacugua

SEQ ID NO: 546963 - RNA, 32 nt, Human
uuuguaaggaagaucauaaaugcuaaaaauuc

SEQ ID NO: 546964 - RNA, 32 nt, Human
uuuguaaggacacucaucugugccccacgucc

SEQ ID NO: 546965 - RNA, 32 nt, Human
uuuguaaguaaguaagaaagaaggcaaauuga

SEQ ID NO: 546966 - RNA, 32 nt, Human
uuuguaagugagagagacaagaagcaaauuuu

SEQ ID NO: 546967 - RNA, 22 nt, Human
uuuguaauacugaauauaaaca

SEQ ID NO: 546968 - RNA, 32 nt, Human
uuuguaauagcaaugauucacacucacagcaa

SEQ ID NO: 546969 - RNA, 32 nt, Human
uuuguaaucccagcuacacaggaggcugaggc

SEQ ID NO: 546970 - RNA, 32 nt, Human
uuuguaaucugggaagugccugguuuugaaaa

SEQ ID NO: 546971 - RNA, 32 nt, Human
uuuguaaugaacacaagccucucuugaguaga

SEQ ID NO: 546972 - RNA, 32 nt, Human
uuuguaaugacagggucuccauauguugccca

SEQ ID NO: 546973 - RNA, 32 nt, Human
uuuguacaacccugacccguuugcuacaucuu

SEQ ID NO: 546974 - RNA, 32 nt, Human
uuuguacacauacacaaaauguaccauuuuaa

SEQ ID NO: 546975 - RNA, 32 nt, Human
uuuguacaccuucuguuucuuugcuuauuuuu

SEQ ID NO: 546976 - RNA, 32 nt, Human
uuuguacagagcagugcacucuaaccuaugcc

SEQ ID NO: 546977 - RNA, 32 nt, Human
uuuguacagcacagaacucacacagaggaaaa

SEQ ID NO: 546978 - RNA, 32 nt, Human
uuuguacaggaauaaacacaccuacgcuccga

SEQ ID NO: 546979 - RNA, 32 nt, Human
uuuguacaggccgccucccuucccgguccggg

SEQ ID NO: 546980 - RNA, 31 nt, Human
uuuguacaguguuagaauacugugaaggcaa

SEQ ID NO: 546981 - RNA, 32 nt, Human
uuuguacaguuccucaugaaguugcaucugag

SEQ ID NO: 546982 - RNA, 32 nt, Human
uuuguacauauguguguauauguauauacaug

SEQ ID NO: 546983 - RNA, 32 nt, Human
uuuguacaugcaucugcauucagcugauggcu

SEQ ID NO: 546984 - RNA, 32 nt, Human
uuuguacaugcuacaauaaaugcagcuggcag

SEQ ID NO: 546985 - RNA, 32 nt, Human
uuuguacauugcacagaaacuugugugggugc

SEQ ID NO: 546986 - RNA, 32 nt, Human
uuuguacauuuuaccacuuaaacaguaaaucu

SEQ ID NO: 546987 - RNA, 24 nt, Human
uuuguaccaagcuacaucgcagug

SEQ ID NO: 546988 - RNA, 32 nt, Human
uuuguaccacuuuuagaagauaccagaugccu

SEQ ID NO: 546989 - RNA, 32 nt, Human
uuuguaccaguggaacuuuuuauacuggagau

SEQ ID NO: 546990 - RNA, 32 nt, Human
uuuguaccgugccguggagugagaggcuccuc

SEQ ID NO: 546991 - RNA, 32 nt, Human
uuuguaccuaugugacagacauuuucaauaau

SEQ ID NO: 546992 - RNA, 32 nt, Human
uuuguaccuggugucuuuuauuaagaauuuac

SEQ ID NO: 546993 - RNA, 32 nt, Human
uuuguaccuuucucacggcacagcguguggcc

SEQ ID NO: 546994 - RNA, 32 nt, Human
uuuguacggaauagauaauuaagagugaagga

SEQ ID NO: 546995 - RNA, 32 nt, Human
uuuguacuaugcuggggcuauuguuaggaguu

SEQ ID NO: 546996 - RNA, 32 nt, Human
uuuguacucaccaggcuggagugugguagcac

SEQ ID NO: 546997 - RNA, 32 nt, Human
uuuguacucaggagucugacuccuggguucua

SEQ ID NO: 546998 - RNA, 32 nt, Human
uuuguacugccucucccgccuguggccaaagu

SEQ ID NO: 546999 - RNA, 32 nt, Human
uuuguacugccugguaugucuguguaauaagc

SEQ ID NO: 547000 - RNA, 32 nt, Human
uuuguacuggucuccuucucuccuuuccaccg

SEQ ID NO: 547001 - RNA, 32 nt, Human
uuuguacuguguugugcuugcugucucucccg

SEQ ID NO: 547002 - RNA, 32 nt, Human
uuuguacuguuuaggucgacgugaggacauca

SEQ ID NO: 547003 - RNA, 32 nt, Human
uuuguacuuuggugggggauucguggaucuuu

SEQ ID NO: 547004 - RNA, 32 nt, Human
uuuguagaaacagggucucaccauguugucca

SEQ ID NO: 547005 - RNA, 32 nt, Human
uuuguagaaacagggucuugcuauguugccca

SEQ ID NO: 547006 - RNA, 23 nt, Human
uuuguagaagaugccuuucuucc

SEQ ID NO: 547007 - RNA, 32 nt, Human
uuuguagaaucccagccccagcaucuccaagc

SEQ ID NO: 547008 - RNA, 32 nt, Human
uuuguagacacagggucucgcuguguugccca

SEQ ID NO: 547009 - RNA, 21 nt, Human
uuuguagaccacguaaccuuc

SEQ ID NO: 547010 - RNA, 32 nt, Human
uuuguagagacagaguuucacuguguuagcca

SEQ ID NO: 547011 - RNA, 32 nt, Human
uuuguagagacagaguuucgucauguugccca

SEQ ID NO: 547012 - RNA, 32 nt, Human
uuuguagagacaggagucuugccauguugccc

SEQ ID NO: 547013 - RNA, 32 nt, Human
uuuguagagacaggaucucacuauguugccca

SEQ ID NO: 547014 - RNA, 32 nt, Human
uuuguagagacagggcuucaccauguugccaa

SEQ ID NO: 547015 - RNA, 32 nt, Human
uuuguagagacagggucccacuauguugcuca

SEQ ID NO: 547016 - RNA, 32 nt, Human
uuuguagagacagggucucaccaugucaccca

SEQ ID NO: 547017 - RNA, 32 nt, Human
uuuguagagacagggucucacuauguugccca

SEQ ID NO: 547018 - RNA, 32 nt, Human
uuuguagagacagggucucacuguguugccca

SEQ ID NO: 547019 - RNA, 32 nt, Human
uuuguagagacagggucucacuguguugccuc

SEQ ID NO: 547020 - RNA, 32 nt, Human
uuuguagagacagggucucacuuuguugccca

SEQ ID NO: 547021 - RNA, 32 nt, Human
uuuguagagacagggucucccuguguugacca

SEQ ID NO: 547022 - RNA, 32 nt, Human
uuuguagagacagggucucgccauguugccca

SEQ ID NO: 547023 - RNA, 32 nt, Human
uuuguagagacagggucuucccauguugccca

SEQ ID NO: 547024 - RNA, 32 nt, Human
uuuguagagacagggucuugccauguugcccu

SEQ ID NO: 547025 - RNA, 32 nt, Human
uuuguagagacaggguuucaccauguugccca

SEQ ID NO: 547026 - RNA, 32 nt, Human
uuuguagagacaggguuucaccauguuggcca

SEQ ID NO: 547027 - RNA, 32 nt, Human
uuuguagagacaggguuucaccauguugguua

SEQ ID NO: 547028 - RNA, 32 nt, Human
uuuguagagacaggguuucgccauguuaucca

SEQ ID NO: 547029 - RNA, 32 nt, Human
uuuguagagacaggguuucgccauguugacga

SEQ ID NO: 547030 - RNA, 32 nt, Human
uuuguagagacaggguuucuccauguugccca

SEQ ID NO: 547031 - RNA, 32 nt, Human
uuuguagagacaggguuuugccauguugcuca

SEQ ID NO: 547032 - RNA, 32 nt, Human
uuuguagagacaggguuuugccauguugucca

SEQ ID NO: 547033 - RNA, 32 nt, Human
uuuguagagacaggguuuugcuaugcugccca

SEQ ID NO: 547034 - RNA, 32 nt, Human
uuuguagagacaggugucucucuacguugccc

SEQ ID NO: 547035 - RNA, 32 nt, Human
uuuguagagacaguguuuagccauguugccca

SEQ ID NO: 547036 - RNA, 32 nt, Human
uuuguagagacgagguuucaccauguugccca

SEQ ID NO: 547037 - RNA, 32 nt, Human
uuuguagagacgagguuucgccauguugccca

SEQ ID NO: 547038 - RNA, 32 nt, Human
uuuguagagacgggguuuuacuauguugccca

SEQ ID NO: 547039 - RNA, 32 nt, Human
uuuguagagagaaagccaggagguaagagcca

SEQ ID NO: 547040 - RNA, 32 nt, Human
uuuguagagaugaggucucccuauguugccca

SEQ ID NO: 547041 - RNA, 32 nt, Human
uuuguagagaugcagucuuacuauguugccca

SEQ ID NO: 547042 - RNA, 32 nt, Human
uuuguagagauggagucucccuauguugcuca

SEQ ID NO: 547043 - RNA, 32 nt, Human
uuuguagagauggggucucccuauguugccca

SEQ ID NO: 547044 - RNA, 32 nt, Human
uuuguagagauguguuuuuccauguugcccaa

SEQ ID NO: 547045 - RNA, 32 nt, Human
uuuguagagccagggucucacuauguugccca

SEQ ID NO: 547046 - RNA, 32 nt, Human
uuuguagaggaacagccagggaaggaacccuc

SEQ ID NO: 547047 - RNA, 32 nt, Human
uuuguagauaauaugcuggucagggcuggucu

SEQ ID NO: 547048 - RNA, 32 nt, Human
uuuguagauauaaggucucaugauauugccca

SEQ ID NO: 547049 - RNA, 24 nt, Human
uuuguagauuauuagugucuuucu

SEQ ID NO: 547050 - RNA, 21 nt, Human
uuuguagcacugcaaugcaga

SEQ ID NO: 547051 - RNA, 32 nt, Human
uuuguagcaguauuuuuauuagaaaagaaucu

SEQ ID NO: 547052 - RNA, 32 nt, Human
uuuguagcaguuguuugucucauuuuugcucu

SEQ ID NO: 547053 - RNA, 32 nt, Human
uuuguagccagccagcucccaggccaacgccc

SEQ ID NO: 547054 - RNA, 18 nt, Human
uuuguagccccagcccua

SEQ ID NO: 547055 - RNA, 25 nt, Human
uuuguagccucucuuuguuuuucuu

SEQ ID NO: 547056 - RNA, 32 nt, Human
uuuguagcucucucacagguagcuuaagcgag

SEQ ID NO: 547057 - RNA, 32 nt, Human
uuuguagcuuccucccuacucucuccaacacc

SEQ ID NO: 547058 - RNA, 32 nt, Human
uuuguaggaaggacagaguggagaggacagug

SEQ ID NO: 547059 - RNA, 32 nt, Human
uuuguaggaggaagaauaucaagguuguggaa

SEQ ID NO: 547060 - RNA, 32 nt, Human
uuuguaggaucacguuguccuuacgauacuga

SEQ ID NO: 547061 - RNA, 32 nt, Human
uuuguaggcagucaguuaccuucaccuuauga

SEQ ID NO: 547062 - RNA, 32 nt, Human
uuuguagggacagggucuugcucuguugccca

SEQ ID NO: 547063 - RNA, 32 nt, Human
uuuguaggugaaagguguagcagucacucggc

SEQ ID NO: 547064 - RNA, 32 nt, Human
uuuguaguaaccaagcaagcaucauaucuuaa

SEQ ID NO: 547065 - RNA, 32 nt, Human
uuuguaguacauccaucuugaguaaauuaagc

SEQ ID NO: 547066 - RNA, 32 nt, Human
uuuguagucagcaagcaaaguacugguccuuu

SEQ ID NO: 547067 - RNA, 32 nt, Human
uuuguagucugucagugucucuuauaaauugc

SEQ ID NO: 547068 - RNA, 32 nt, Human
uuuguaguucagaaagugaggcucaaagaauu

SEQ ID NO: 547069 - RNA, 32 nt, Human
uuuguaguuccuauuucuguggguuugccugg

SEQ ID NO: 547070 - RNA, 32 nt, Human
uuuguaguugaauauuggccaaggaaaggcac

SEQ ID NO: 547071 - RNA, 32 nt, Human
uuuguaguuuguucauucauccauccaccugu

SEQ ID NO: 547072 - RNA, 32 nt, Human
uuuguauaacuaugcagccuucccucucuuuc

SEQ ID NO: 547073 - RNA, 22 nt, Human
uuuguauagcucuucugcccca

SEQ ID NO: 547074 - RNA, 32 nt, Human
uuuguauaguuacuauccugugcagcagcugg

SEQ ID NO: 547075 - RNA, 32 nt, Human
uuuguauauaaauauguaaauacaugcuuuaa

SEQ ID NO: 547076 - RNA, 32 nt, Human
uuuguauaucaaaaucauguaguuuguauaaa

SEQ ID NO: 547077 - RNA, 32 nt, Human
uuuguauauguacuugcuuuaucucuuuaccc

SEQ ID NO: 547078 - RNA, 32 nt, Human
uuuguauauuguaggaaucccuuugagaaugu

SEQ ID NO: 547079 - RNA, 23 nt, Human
uuuguauauuucucuuugucaga

SEQ ID NO: 547080 - RNA, 32 nt, Human
uuuguauauuuuuauagguuagauuuguaaag

SEQ ID NO: 547081 - RNA, 32 nt, Human
uuuguaucaauccauuuucacacugcuauaag

SEQ ID NO: 547082 - RNA, 32 nt, Human
uuuguaucaccuuugcuaucuuggggaaagug

SEQ ID NO: 547083 - RNA, 32 nt, Human
uuuguaucagcagaacaguaguggacucgacu

SEQ ID NO: 547084 - RNA, 32 nt, Human
uuuguaucaguaucauuugaucugccauggac

SEQ ID NO: 547085 - RNA, 32 nt, Human
uuuguauccauucauuacuuuccucuuuucaa

SEQ ID NO: 547086 - RNA, 32 nt, Human
uuuguaucccugcuuauugcaccugacgacua

SEQ ID NO: 547087 - RNA, 32 nt, Human
uuuguauccuuccuagagacaggauuucgcca

SEQ ID NO: 547088 - RNA, 32 nt, Human
uuuguaucuccuggggagcuuuuaaagaguac

SEQ ID NO: 547089 - RNA, 32 nt, Human
uuuguaugaacuucuggaucuccagucagaua

SEQ ID NO: 547090 - RNA, 23 nt, Human
uuuguaugacucguuuguucuuu

SEQ ID NO: 547091 - RNA, 21 nt, Human
uuuguaugagaaauaaacgua

SEQ ID NO: 547092 - RNA, 29 nt, Human
uuuguaugucuguguauguauaggggaaa

SEQ ID NO: 547093 - RNA, 32 nt, Human
uuuguauuccauacuaaagccaugaagaacua

SEQ ID NO: 547094 - RNA, 32 nt, Human
uuuguauugggagcucuggaccaauagugucu

SEQ ID NO: 547095 - RNA, 32 nt, Human
uuuguauuuaacuaccugcuucccaggcgucc

SEQ ID NO: 547096 - RNA, 32 nt, Human
uuuguauuuacacuacagauuggugaauuugc

SEQ ID NO: 547097 - RNA, 32 nt, Human
uuuguauuuccagagagaaugucuuuuagauu

SEQ ID NO: 547098 - RNA, 32 nt, Human
uuuguauuuccccuggacaaaaugauaccuaa

SEQ ID NO: 547099 - RNA, 32 nt, Human
uuuguauuugaaucuuugccucgggaucuacu

SEQ ID NO: 547100 - RNA, 32 nt, Human
uuuguauuuggucccaguuggguacauuuuaa

SEQ ID NO: 547101 - RNA, 32 nt, Human
uuuguauuuugcuacugaucugugaucaacca

SEQ ID NO: 547102 - RNA, 32 nt, Human
uuuguauuuuguaggauugaucuuauuuugag

SEQ ID NO: 547103 - RNA, 32 nt, Human
uuuguauuuuuagcagagacagggaggaaguu

SEQ ID NO: 547104 - RNA, 32 nt, Human
uuuguauuuuuagcagagacaggguuucacca

SEQ ID NO: 547105 - RNA, 32 nt, Human
uuuguauuuuuagcagagacaggguuucaccg

SEQ ID NO: 547106 - RNA, 32 nt, Human
uuuguauuuuuagcagagacgggguuucaccg

SEQ ID NO: 547107 - RNA, 32 nt, Human
uuuguauuuuuagcagagauggggguuucacc

SEQ ID NO: 547108 - RNA, 32 nt, Human
uuuguauuuuuagcagagaugggguuucacca

SEQ ID NO: 547109 - RNA, 32 nt, Human
uuuguauuuuuagcagagaugggguuucaccg

SEQ ID NO: 547110 - RNA, 32 nt, Human
uuuguauuuuuagcagagaugggguuuuacca

SEQ ID NO: 547111 - RNA, 32 nt, Human
uuuguauuuuuaguaaagaugggguuucacca

SEQ ID NO: 547112 - RNA, 32 nt, Human
uuuguauuuuuaguagagauggaguuucacca

SEQ ID NO: 547113 - RNA, 32 nt, Human
uuuguauuuuuaguagagauggaguuucacua

SEQ ID NO: 547114 - RNA, 32 nt, Human
uuuguauuuuuaguagagauggaguuuuacua

SEQ ID NO: 547115 - RNA, 32 nt, Human
uuuguauuuuuggcagagaugggguuucacca

SEQ ID NO: 547116 - RNA, 32 nt, Human
uuugucaaaacaaaugcuguacuccaauuuuc

SEQ ID NO: 547117 - RNA, 32 nt, Human
uuugucaaaaggaagucucuagguucugagcu

SEQ ID NO: 547118 - RNA, 32 nt, Human
uuugucaauuaggaauuuuccaggcaaugugu

SEQ ID NO: 547119 - RNA, 32 nt, Human
uuugucacagccggccuugcgaagccuccuca

SEQ ID NO: 547120 - RNA, 32 nt, Human
uuugucaccaggcuggagugcaguggugcaau

SEQ ID NO: 547121 - RNA, 32 nt, Human
uuugucacccaggcuggagugcaguggcacga

SEQ ID NO: 547122 - RNA, 32 nt, Human
uuugucacccaggcuggagugcaguggcauga

SEQ ID NO: 547123 - RNA, 32 nt, Human
uuugucacccaggcuggagugcaguggggcaa

SEQ ID NO: 547124 - RNA, 32 nt, Human
uuugucacccaggcuggagugcagugguguga

SEQ ID NO: 547125 - RNA, 32 nt, Human
uuugucaccgaggcuggagugcaauggcccga

SEQ ID NO: 547126 - RNA, 32 nt, Human
uuugucacuguucuauuagacuuuuuacugaa

SEQ ID NO: 547127 - RNA, 32 nt, Human
uuugucacuucccaguuugucuugucauucag

SEQ ID NO: 547128 - RNA, 24 nt, Human
uuugucagacauuccuguuuuucu

SEQ ID NO: 547129 - RNA, 32 nt, Human
uuugucagacugguagaaguugcuuugcauau

SEQ ID NO: 547130 - RNA, 32 nt, Human
uuugucagaguggggaaauaaaagggcuuuau

SEQ ID NO: 547131 - RNA, 32 nt, Human
uuugucagccaggcuggagugcagugacacga

SEQ ID NO: 547132 - RNA, 32 nt, Human
uuugucagcccgauuauuugcaaagaaaauau

SEQ ID NO: 547133 - RNA, 32 nt, Human
uuugucaggaagggaaggggcucaacacagug

SEQ ID NO: 547134 - RNA, 32 nt, Human
uuugucaggcugggcgcgguggcucacuccug

SEQ ID NO: 547135 - RNA, 32 nt, Human
uuugucaggcugggugcaguggcucaugccug

SEQ ID NO: 547136 - RNA, 32 nt, Human
uuugucagucucuucccucccccagucucucu

SEQ ID NO: 547137 - RNA, 32 nt, Human
uuugucauaacccuggucuggcugguuuugag

SEQ ID NO: 547138 - RNA, 32 nt, Human
uuugucaucucucaaauuagaauauaaauuuu

SEQ ID NO: 547139 - RNA, 32 nt, Human
uuugucaucuucacucuccacccccagagagg

SEQ ID NO: 547140 - RNA, 32 nt, Human
uuugucaugcagaugacuucagaccugauuaa

SEQ ID NO: 547141 - RNA, 32 nt, Human
uuuguccaaauuucugggcucagcgcuuggga

SEQ ID NO: 547142 - RNA, 32 nt, Human
uuuguccacacaagacagcagagccaucugcg

SEQ ID NO: 547143 - RNA, 32 nt, Human
uuuguccaccucuccuuuaucucuguuucucu

SEQ ID NO: 547144 - RNA, 32 nt, Human
uuuguccagguaacaacacuaaagacaacccu

SEQ ID NO: 547145 - RNA, 32 nt, Human
uuuguccauguguuaaauggccaucagcuuua

SEQ ID NO: 547146 - RNA, 32 nt, Human
uuuguccauucuaguggccaaacaguaacagu

SEQ ID NO: 547147 - RNA, 32 nt, Human
uuugucccaacaaccucuggccccagcacccc

SEQ ID NO: 547148 - RNA, 32 nt, Human
uuugucccacaaaaucacaggagcacuguaug

SEQ ID NO: 547149 - RNA, 32 nt, Human
uuugucccagaaugccuccugcagggauucuu

SEQ ID NO: 547150 - RNA, 32 nt, Human
uuugucccagacuuccccuugggaucagggcu

SEQ ID NO: 547151 - RNA, 32 nt, Human
uuugucccccaggcuggagugcagugguacaa

SEQ ID NO: 547152 - RNA, 32 nt, Human
uuuguccccuggcugcugcccucccauucucc

SEQ ID NO: 547153 - RNA, 32 nt, Human
uuugucccguguaagggaacagguguggggaa

SEQ ID NO: 547154 - RNA, 32 nt, Human
uuugucccuaugguagccucagucucuuuauc

SEQ ID NO: 547155 - RNA, 32 nt, Human
uuugucccucaaacuaacaccccacacugcuu

SEQ ID NO: 547156 - RNA, 32 nt, Human
uuugucccucccccgcuuccucccucugcggg

SEQ ID NO: 547157 - RNA, 23 nt, Human
uuugucccuggcggugagagccc

SEQ ID NO: 547158 - RNA, 23 nt, Human
uuugucccuggggcugauggccc

SEQ ID NO: 547159 - RNA, 31 nt, Human
uuugucccuuucagugggccuguggucucug

SEQ ID NO: 547160 - RNA, 20 nt, Human
uuugucccuuucugaccuca

SEQ ID NO: 547161 - RNA, 32 nt, Human
uuuguccgagccuguggucaaggcgcugacca

SEQ ID NO: 547162 - RNA, 32 nt, Human
uuuguccguccacucuacaaaguuuccuccuc

SEQ ID NO: 547163 - RNA, 32 nt, Human
uuuguccuaaaacaccugguaggaguguguga

SEQ ID NO: 547164 - RNA, 32 nt, Human
uuuguccuaagugguauguucaaggagccuau

SEQ ID NO: 547165 - RNA, 32 nt, Human
uuuguccucggaggaggaggccagggacagac

SEQ ID NO: 547166 - RNA, 32 nt, Human
uuuguccucugaugagaaucuaaugucgcugu

SEQ ID NO: 547167 - RNA, 32 nt, Human
uuuguccucugccucccucugcuguucuucua

SEQ ID NO: 547168 - RNA, 32 nt, Human
uuuguccugcugaaccacuccagccugcugcg

SEQ ID NO: 547169 - RNA, 32 nt, Human
uuuguccugcuucucacuugacauugcauuac

SEQ ID NO: 547170 - RNA, 32 nt, Human
uuuguccugcuucucacuugacauugcauuau

SEQ ID NO: 547171 - RNA, 32 nt, Human
uuuguccuggugcaguggggcagcccugcauc

SEQ ID NO: 547172 - RNA, 32 nt, Human
uuuguccuguguguguuuacaguauucaauuu

SEQ ID NO: 547173 - RNA, 32 nt, Human
uuuguccuuaggugugagguccaggguugcua

SEQ ID NO: 547174 - RNA, 22 nt, Human
uuuguccuucacgguaugccag

SEQ ID NO: 547175 - RNA, 22 nt, Human
uuuguccuucucugccuuucuc

SEQ ID NO: 547176 - RNA, 32 nt, Human
uuuguccuugccacagucacggggugcaugug

SEQ ID NO: 547177 - RNA, 32 nt, Human
uuugucgagaggauuuccugagacugguuugg

SEQ ID NO: 547178 - RNA, 32 nt, Human
uuugucgccaggcuggagugcaguggugccau

SEQ ID NO: 547179 - RNA, 32 nt, Human
uuugucgcccaggcuggagugcaguggcacaa

SEQ ID NO: 547180 - RNA, 32 nt, Human
uuugucgcccaggcuggagugcaguggcacga

SEQ ID NO: 547181 - RNA, 32 nt, Human
uuugucgcccaggcuggagugcaguggcagug

SEQ ID NO: 547182 - RNA, 32 nt, Human
uuugucgcccaggcuggagugcaguggcauga

SEQ ID NO: 547183 - RNA, 32 nt, Human
uuugucgcccaggcuggagugcaguggcguga

SEQ ID NO: 547184 - RNA, 32 nt, Human
uuugucgcccaggcuggagugcagugguguga

SEQ ID NO: 547185 - RNA, 32 nt, Human
uuugucgcccuggcuggagugcaguugcgcag

SEQ ID NO: 547186 - RNA, 32 nt, Human
uuugucguaaacauuaaagugcaggucaguga

SEQ ID NO: 547187 - RNA, 32 nt, Human
uuugucgugggacuucaggccacauuggcuug

SEQ ID NO: 547188 - RNA, 25 nt, Human
uuugucgugguuccugccuuucuca

SEQ ID NO: 547189 - RNA, 32 nt, Human
uuugucgugugcgauccucacacucaugaaca

SEQ ID NO: 547190 - RNA, 32 nt, Human
uuugucuacagagagaaaaauugccuucaucc

SEQ ID NO: 547191 - RNA, 32 nt, Human
uuugucuacggaagccucugggugacaaaagu

SEQ ID NO: 547192 - RNA, 32 nt, Human
uuugucuagauuucuuuugccucucucacuga

SEQ ID NO: 547193 - RNA, 32 nt, Human
uuugucuagggcuuccucuugagacccucuuc

SEQ ID NO: 547194 - RNA, 32 nt, Human
uuugucuauguauauuucuagauauugauuag

SEQ ID NO: 547195 - RNA, 32 nt, Human
uuugucucaucccauucugcgucaugcuugug

SEQ ID NO: 547196 - RNA, 32 nt, Human
uuugucucauuucuucccuuuguuccuuaguc

SEQ ID NO: 547197 - RNA, 32 nt, Human
uuugucuccaaagcccuucuucuuuccaccac

SEQ ID NO: 547198 - RNA, 32 nt, Human
uuugucuccagccccugguccccagcucuugc

SEQ ID NO: 547199 - RNA, 32 nt, Human
uuugucucuccucuaugcgugcccauugcaga

SEQ ID NO: 547200 - RNA, 32 nt, Human
uuugucucucuuucuuuucuccuuugauuaua

SEQ ID NO: 547201 - RNA, 32 nt, Human
uuugucucugacaauacuugguguuuuucccu

SEQ ID NO: 547202 - RNA, 32 nt, Human
uuugucucuguucacuacugcgauagaggaaa

SEQ ID NO: 547203 - RNA, 32 nt, Human
uuugucucuguucuaaaauggaggcaguaggg

SEQ ID NO: 547204 - RNA, 32 nt, Human
uuugucucuuucuuucuugucuuugcucuuug

SEQ ID NO: 547205 - RNA, 32 nt, Human
uuugucucuuuuccuuuuucuguauccuguga

SEQ ID NO: 547206 - RNA, 32 nt, Human
uuugucugcaagagcugccacgcccaguucua

SEQ ID NO: 547207 - RNA, 32 nt, Human
uuugucuggcugauucuguccucaaauaaagc

SEQ ID NO: 547208 - RNA, 32 nt, Human
uuugucugggaagcagggauugcugacaugua

SEQ ID NO: 547209 - RNA, 32 nt, Human
uuugucuggugcaugugaugaaaccugcagcu

SEQ ID NO: 547210 - RNA, 32 nt, Human
uuugucuguccucugcugaggcuacggccggg

SEQ ID NO: 547211 - RNA, 29 nt, Human
uuugucugucugugugucugugacaguca

SEQ ID NO: 547212 - RNA, 32 nt, Human
uuugucuguguccuaggucgguuucugccacu

SEQ ID NO: 547213 - RNA, 32 nt, Human
uuugucuuagggucaagugaucuuuaugggau

SEQ ID NO: 547214 - RNA, 32 nt, Human
uuugucuucaaacugugaagcauuuacagaaa

SEQ ID NO: 547215 - RNA, 32 nt, Human
uuugucuucacucaacgucagggugggggagu

SEQ ID NO: 547216 - RNA, 32 nt, Human
uuugucuucacuccauuauaaagguaaguuac

SEQ ID NO: 547217 - RNA, 32 nt, Human
uuugucuucaguauuaggucuccaacucuugu

SEQ ID NO: 547218 - RNA, 19 nt, Human
uuugucuuccagccugcca

SEQ ID NO: 547219 - RNA, 32 nt, Human
uuugucuuccauuccauuguuuugaaacucag

SEQ ID NO: 547220 - RNA, 32 nt, Human
uuugucuucuaugcucccuggcugcagauuaa

SEQ ID NO: 547221 - RNA, 32 nt, Human
uuugucuucucuguggaagacaggaggcuaca

SEQ ID NO: 547222 - RNA, 32 nt, Human
uuugucuugugcuccagcuggagcuuuggucc

SEQ ID NO: 547223 - RNA, 32 nt, Human
uuugucuugugucuugagagcuuggccuuaug

SEQ ID NO: 547224 - RNA, 19 nt, Human
uuugucuuucccgcggccc

SEQ ID NO: 547225 - RNA, 32 nt, Human
uuugucuuugggccugggcaggcuuaggauuu

SEQ ID NO: 547226 - RNA, 32 nt, Human
uuugucuuuucaucuuugugcauaacuuaccu

SEQ ID NO: 547227 - RNA, 32 nt, Human
uuugucuuuuggcuucucaguagcuaagggga

SEQ ID NO: 547228 - RNA, 32 nt, Human
uuugugaaaaccaguuugaugugcuaaaagua

SEQ ID NO: 547229 - RNA, 32 nt, Human
uuugugaaaaugucaaagagaaaacuuauaua

SEQ ID NO: 547230 - RNA, 32 nt, Human
uuugugaaagagaagccuaaauucagcaucuc

SEQ ID NO: 547231 - RNA, 32 nt, Human
uuugugaaaggcugcuggccuccaaaggagag

SEQ ID NO: 547232 - RNA, 32 nt, Human
uuugugaaauauaacuuacaaauaaguacuua

SEQ ID NO: 547233 - RNA, 32 nt, Human
uuugugaaaucaagauguuuuaaucacauuca

SEQ ID NO: 547234 - RNA, 32 nt, Human
uuugugaaaugcuuuuucuccauguauugaga

SEQ ID NO: 547235 - RNA, 32 nt, Human
uuugugaacaaaugagacaaggcugcaaauuc

SEQ ID NO: 547236 - RNA, 32 nt, Human
uuugugaacaucacugaagcucugaagcuuug

SEQ ID NO: 547237 - RNA, 32 nt, Human
uuugugaacuuguauauuacaggaaacaagau

SEQ ID NO: 547238 - RNA, 32 nt, Human
uuugugaagauguguaagcaggauccgagcgu

SEQ ID NO: 547239 - RNA, 32 nt, Human
uuugugaaggcucugccagacaccuccaagcu

SEQ ID NO: 547240 - RNA, 32 nt, Human
uuugugaaggucagagaugcuuugccagucuc

SEQ ID NO: 547241 - RNA, 32 nt, Human
uuugugaaugaccuugguaacagaacaguugg

SEQ ID NO: 547242 - RNA, 23 nt, Human
uuugugaauuucccauggcccca

SEQ ID NO: 547243 - RNA, 32 nt, Human
uuugugaauuuggcuucauuuuacuuauacau

SEQ ID NO: 547244 - RNA, 32 nt, Human
uuugugaauuuggcuuccuuuuacuuauacau

SEQ ID NO: 547245 - RNA, 32 nt, Human
uuugugaccaagcagccucucccuucacccag

SEQ ID NO: 547246 - RNA, 23 nt, Human
uuugugaccacaaaaaugucucu

SEQ ID NO: 547247 - RNA, 24 nt, Human
uuugugaccagccugaccaacaua

SEQ ID NO: 547248 - RNA, 32 nt, Human
uuugugaccagccugaccaacauagugaaacc

SEQ ID NO: 547249 - RNA, 32 nt, Human
uuugugaccagccuggccaacauagugaaauc

SEQ ID NO: 547250 - RNA, 23 nt, Human
uuugugaccguucuugucuuucu

SEQ ID NO: 547251 - RNA, 32 nt, Human
uuugugacugacuggugucuucccauuuggac

SEQ ID NO: 547252 - RNA, 32 nt, Human
uuugugacuggcuucauuuacuuagcauauug

SEQ ID NO: 547253 - RNA, 32 nt, Human
uuugugacuuggcaggaccaggaaacagcagc

SEQ ID NO: 547254 - RNA, 32 nt, Human
uuugugagaagaaagucccugccccucccucg

SEQ ID NO: 547255 - RNA, 32 nt, Human
uuugugagauggggucucgcacugucccccag

SEQ ID NO: 547256 - RNA, 32 nt, Human
uuugugagcaugggugugcccuugggguaagc

SEQ ID NO: 547257 - RNA, 32 nt, Human
uuugugagguguaaaaccugcaugaaggaccc

SEQ ID NO: 547258 - RNA, 32 nt, Human
uuugugaguaaaagaggagcccagggagacag

SEQ ID NO: 547259 - RNA, 32 nt, Human
uuugugaguagaaagacuuuagguaauggaaa

SEQ ID NO: 547260 - RNA, 32 nt, Human
uuugugaguaggagagcugauaccucacauuc

SEQ ID NO: 547261 - RNA, 32 nt, Human
uuugugagucaauacauagugcugcugugugc

SEQ ID NO: 547262 - RNA, 32 nt, Human
uuugugagugcgggcaagucacucagccuccc

SEQ ID NO: 547263 - RNA, 32 nt, Human
uuugugaguggugucuuugagauacugauggc

SEQ ID NO: 547264 - RNA, 32 nt, Human
uuugugauaaagaaugugaacaguuguuagau

SEQ ID NO: 547265 - RNA, 32 nt, Human
uuugugauacuuccugugcucccucagagaga

SEQ ID NO: 547266 - RNA, 32 nt, Human
uuugugaugggcuucucucagcgguagcucag

SEQ ID NO: 547267 - RNA, 32 nt, Human
uuugugauucccucagaucugcccuaaucccg

SEQ ID NO: 547268 - RNA, 32 nt, Human
uuugugauuuccucugaugcaggagaggaaaa

SEQ ID NO: 547269 - RNA, 32 nt, Human
uuugugcaaaauauacauauaaacagaguaag

SEQ ID NO: 547270 - RNA, 32 nt, Human
uuugugcacaacuucagccacaauucaugggg

SEQ ID NO: 547271 - RNA, 32 nt, Human
uuugugcaccacuacugcagucgguacagaac

SEQ ID NO: 547272 - RNA, 32 nt, Human
uuugugcacuugcuuaguggauuguauuggau

SEQ ID NO: 547273 - RNA, 32 nt, Human
uuugugcagaucuuuaacauguuagugaacag

SEQ ID NO: 547274 - RNA, 32 nt, Human
uuugugcaggucacaugcccacugcagcccuc

SEQ ID NO: 547275 - RNA, 32 nt, Human
uuugugcauauguaccauugugcauguugcug

SEQ ID NO: 547276 - RNA, 32 nt, Human
uuugugcaucucuuaaggagguuuuuaaaauc

SEQ ID NO: 547277 - RNA, 32 nt, Human
uuugugcauuaauacauuacaaacaugaagau

SEQ ID NO: 547278 - RNA, 32 nt, Human
uuugugcauuuggaagugacaucgcugugugg

SEQ ID NO: 547279 - RNA, 32 nt, Human
uuugugccacaucuuccaacugagucuccccc

SEQ ID NO: 547280 - RNA, 32 nt, Human
uuugugccacugguucagcuguuagcacagua

SEQ ID NO: 547281 - RNA, 32 nt, Human
uuugugccagcaucugcugucagguggcucag

SEQ ID NO: 547282 - RNA, 32 nt, Human
uuugugcccagacuguuuuccucucucuuucc

SEQ ID NO: 547283 - RNA, 19 nt, Human
uuugugcccagcaagcugu

SEQ ID NO: 547284 - RNA, 32 nt, Human
uuugugcccuacuuuucuucuuguagggcuug

SEQ ID NO: 547285 - RNA, 32 nt, Human
uuugugccuaugccuucucucuccucagacag

SEQ ID NO: 547286 - RNA, 32 nt, Human
uuugugccuauguacauguguaaacaugccau

SEQ ID NO: 547287 - RNA, 32 nt, Human
uuugugccucacacuccagccuggguaacaga

SEQ ID NO: 547288 - RNA, 32 nt, Human
uuugugccuccccuuagucccuucccucccga

SEQ ID NO: 547289 - RNA, 32 nt, Human
uuugugccuggcuucuuucacuuaacauuaua

SEQ ID NO: 547290 - RNA, 32 nt, Human
uuugugccuugcacuccaugcauucugauaac

SEQ ID NO: 547291 - RNA, 32 nt, Human
uuugugcuaagcugauaaguaucaaacgauga

SEQ ID NO: 547292 - RNA, 32 nt, Human
uuugugcuagagcgagacccacacaacaacag

SEQ ID NO: 547293 - RNA, 23 nt, Human
uuugugcucacacccagcacgga

SEQ ID NO: 547294 - RNA, 32 nt, Human
uuugugcucaggcuggggaacagagaggcacg

SEQ ID NO: 547295 - RNA, 32 nt, Human
uuugugcucaugggaagcucuuuaagcaccug

SEQ ID NO: 547296 - RNA, 21 nt, Human
uuugugcuccccuuugccuaa

SEQ ID NO: 547297 - RNA, 20 nt, Human
uuugugcucccgcuuccuaa

SEQ ID NO: 547298 - RNA, 24 nt, Human
uuugugcucccucacucccuaaua

SEQ ID NO: 547299 - RNA, 32 nt, Human
uuugugcucuacuguuacuaggcuauuaauuu

SEQ ID NO: 547300 - RNA, 31 nt, Human
uuugugcucugaguuuugcuguugaaagucu

SEQ ID NO: 547301 - RNA, 32 nt, Human
uuugugcucugauaaauuguguucuguuaaag

SEQ ID NO: 547302 - RNA, 32 nt, Human
uuugugcucuucuguuccaaggaccacaggua

SEQ ID NO: 547303 - RNA, 23 nt, Human
uuugugcugaagaaaaacuuuac

SEQ ID NO: 547304 - RNA, 25 nt, Human
uuugugcugauuaacaccccuaaua

SEQ ID NO: 547305 - RNA, 32 nt, Human
uuugugcugcugcuguuauucaaagaucaaag

SEQ ID NO: 547306 - RNA, 32 nt, Human
uuugugcugggaacugaaagaguggggaaggu

SEQ ID NO: 547307 - RNA, 32 nt, Human
uuugugcuguguauaucacugcuuuauauaag

SEQ ID NO: 547308 - RNA, 32 nt, Human
uuugugcuucaaggagaugauaccugucaucc

SEQ ID NO: 547309 - RNA, 32 nt, Human
uuugugcuuccucuuucuccagaagccuucug

SEQ ID NO: 547310 - RNA, 32 nt, Human
uuugugcuucucuucagccccuucccuguguc

SEQ ID NO: 547311 - RNA, 32 nt, Human
uuugugcuugaacccagggcugugcuggugua

SEQ ID NO: 547312 - RNA, 32 nt, Human
uuugugcuuuggguuucuuuguugacugaaaa

SEQ ID NO: 547313 - RNA, 32 nt, Human
uuugugcuuuucucccugggccucauuuuaau

SEQ ID NO: 547314 - RNA, 32 nt, Human
uuuguggaagaaggacagggagcuagagccaa

SEQ ID NO: 547315 - RNA, 32 nt, Human
uuuguggacagguggccccuggagucaugccu

SEQ ID NO: 547316 - RNA, 32 nt, Human
uuuguggacuugucugaccaccuucuauuugc

SEQ ID NO: 547317 - RNA, 32 nt, Human
uuuguggagaggaggguguucuggccugagaa

SEQ ID NO: 547318 - RNA, 32 nt, Human
uuuguggaggcccauuuugcaaguggaaaccu

SEQ ID NO: 547319 - RNA, 32 nt, Human
uuuguggauaaggggccgggugcaguggcuca

SEQ ID NO: 547320 - RNA, 32 nt, Human
uuuguggauacagggucucauucuguugccua

SEQ ID NO: 547321 - RNA, 32 nt, Human
uuuguggaugaaucccacauuaggauggugaa

SEQ ID NO: 547322 - RNA, 32 nt, Human
uuuguggcauggauugcugugcucacugcugu

SEQ ID NO: 547323 - RNA, 32 nt, Human
uuuguggccagauuucaaauagggaguuaagu

SEQ ID NO: 547324 - RNA, 32 nt, Human
uuuguggccaggguuugugcagcagcuuugug

SEQ ID NO: 547325 - RNA, 32 nt, Human
uuuguggccuaugccuuggcuuuuccccgggc

SEQ ID NO: 547326 - RNA, 32 nt, Human
uuuguggccugggcaggaugcagagaaugaca

SEQ ID NO: 547327 - RNA, 29 nt, Human
uuuguggcugugugugugacugugagugu

SEQ ID NO: 547328 - RNA, 32 nt, Human
uuuguggcuuccucuaccugugcucagccaug

SEQ ID NO: 547329 - RNA, 32 nt, Human
uuugugggaaaugaguugagaccauggacuug

SEQ ID NO: 547330 - RNA, 32 nt, Human
uuugugggaagacauaccucccagaggggcau

SEQ ID NO: 547331 - RNA, 32 nt, Human
uuugugggaaggcaugguaugagucgagauug

SEQ ID NO: 547332 - RNA, 32 nt, Human
uuugugggagaaagaggagcuggaguuacaga

SEQ ID NO: 547333 - RNA, 32 nt, Human
uuugugggagugaaucagccgguaagagcugu

SEQ ID NO: 547334 - RNA, 32 nt, Human
uuugugggcauaagcaaacaccauaacuauga

SEQ ID NO: 547335 - RNA, 32 nt, Human
uuugugggcccagcuacaaggaggacuugcag

SEQ ID NO: 547336 - RNA, 32 nt, Human
uuugugggcugcagaguugagaguugggugag

SEQ ID NO: 547337 - RNA, 32 nt, Human
uuuguggggaagggcagcugagccaaaggggu

SEQ ID NO: 547338 - RNA, 32 nt, Human
uuuguggggccugggcuucugugguuuaaggg

SEQ ID NO: 547339 - RNA, 32 nt, Human
uuuguggggccugucuccgcugccuccuucuc

SEQ ID NO: 547340 - RNA, 32 nt, Human
uuuguggggcuucgugcccugcucuggggccc

SEQ ID NO: 547341 - RNA, 32 nt, Human
uuuguggggucaggacacagagugggagggag

SEQ ID NO: 547342 - RNA, 32 nt, Human
uuuguggggucugagguuccugucccaggguu

SEQ ID NO: 547343 - RNA, 32 nt, Human
uuuguggggugagauuggggguuggaccagag

SEQ ID NO: 547344 - RNA, 32 nt, Human
uuugugggucugcccugagcugugccugugug

SEQ ID NO: 547345 - RNA, 32 nt, Human
uuuguggguguccccacuggaguguaagcccu

SEQ ID NO: 547346 - RNA, 32 nt, Human
uuugugguauaucuuuuuccaucauguuacuu

SEQ ID NO: 547347 - RNA, 32 nt, Human
uuuguggucaccacgaagaugaggaccaacuu

SEQ ID NO: 547348 - RNA, 32 nt, Human
uuuguggucaugagagcugggguggggaagga

SEQ ID NO: 547349 - RNA, 32 nt, Human
uuuguggucucgaaaaccuggaguagacagcc

SEQ ID NO: 547350 - RNA, 32 nt, Human
uuuguggucuucccaucaggaacgcuggaaag

SEQ ID NO: 547351 - RNA, 32 nt, Human
uuuguggugcugaaccuguuuaucucugucau

SEQ ID NO: 547352 - RNA, 32 nt, Human
uuuguggugucacccgcacuguuugcuucauu

SEQ ID NO: 547353 - RNA, 32 nt, Human
uuugugguuaccaagcaggguucccccuuccc

SEQ ID NO: 547354 - RNA, 32 nt, Human
uuugugguucaguauuucccaccuacauuucu

SEQ ID NO: 547355 - RNA, 32 nt, Human
uuugugguucccaaugugucugucccacccug

SEQ ID NO: 547356 - RNA, 32 nt, Human
uuugugguuugacuucuaugguguuuuaaaaa

SEQ ID NO: 547357 - RNA, 32 nt, Human
uuuguguaacaucugugcacaccauccauucc

SEQ ID NO: 547358 - RNA, 29 nt, Human
uuuguguaacugugugugcauguuggucu

SEQ ID NO: 547359 - RNA, 32 nt, Human
uuuguguacaguuaaaggagagauggccaagc

SEQ ID NO: 547360 - RNA, 31 nt, Human
uuuguguaccuuuucugucauauucagaaac

SEQ ID NO: 547361 - RNA, 32 nt, Human
uuuguguacuaaaacuaccagcguauagauuu

SEQ ID NO: 547362 - RNA, 31 nt, Human
uuuguguaucuuuucugacugggaugggggc

SEQ ID NO: 547363 - RNA, 32 nt, Human
uuuguguauuuuuacuagagacaggguuucac

SEQ ID NO: 547364 - RNA, 32 nt, Human
uuuguguauuuuuaguagagacaggguuucac

SEQ ID NO: 547365 - RNA, 32 nt, Human
uuuguguauuuuuaguagagaugggguuucac

SEQ ID NO: 547366 - RNA, 32 nt, Human
uuugugucaccuuugaaucugaggcaguuucc

SEQ ID NO: 547367 - RNA, 32 nt, Human
uuugugucaucccaucagcaaugaaggucccu

SEQ ID NO: 547368 - RNA, 32 nt, Human
uuuguguccagaaacugcaaguugacaugaau

SEQ ID NO: 547369 - RNA, 32 nt, Human
uuugugucucaaaucagauaagagaagccugu

SEQ ID NO: 547370 - RNA, 32 nt, Human
uuugugucuccugugacuaucuccuucuucac

SEQ ID NO: 547371 - RNA, 32 nt, Human
uuugugucugcagagcucuggcacucgcuucg

SEQ ID NO: 547372 - RNA, 32 nt, Human
uuugugucuggcuucuuucacuuaguacaagu

SEQ ID NO: 547373 - RNA, 32 nt, Human
uuugugucuuucuccuccuccuccugcguccc

SEQ ID NO: 547374 - RNA, 32 nt, Human
uuugugugagauguaguuuucccaucuccugg

SEQ ID NO: 547375 - RNA, 32 nt, Human
uuugugugauuccuuaccucuggcugauaaaa

SEQ ID NO: 547376 - RNA, 32 nt, Human
uuugugugcaugaaagagaaagacugauuacc

SEQ ID NO: 547377 - RNA, 32 nt, Human
uuugugugccuuccuugguacuucugagguau

SEQ ID NO: 547378 - RNA, 32 nt, Human
uuugugugcuaccucaucuugccacugcagug

SEQ ID NO: 547379 - RNA, 32 nt, Human
uuugugugggguucuuaaaaaugugagaagcu

SEQ ID NO: 547380 - RNA, 32 nt, Human
uuuguguguaugaugaacagaugucuccuuuc

SEQ ID NO: 547381 - RNA, 32 nt, Human
uuuuuaagacagagucucacucuguugcccag

SEQ ID NO: 547382 - RNA, 24 nt, Human
uuuuuaagacagggucucauucua

SEQ ID NO: 547383 - RNA, 32 nt, Human
uuuuuaagacaguauggagaaaucaccauacu

SEQ ID NO: 547384 - RNA, 31 nt, Human
uuuuuaagacaugaauuacauuuaaaauuag

SEQ ID NO: 547385 - RNA, 32 nt, Human
uuuuuaagacuuuugaccauaguguuuuccag

SEQ ID NO: 547386 - RNA, 32 nt, Human
uuuuuaagagacaggucucccuacguagccca

SEQ ID NO: 547387 - RNA, 32 nt, Human
uuuuuaagaggugaaaucauuugcugguuguu

SEQ ID NO: 547388 - RNA, 32 nt, Human
uuuuuaagauagagucucacucugcugcccgg

SEQ ID NO: 547389 - RNA, 32 nt, Human
uuuuuaagccaugacaucccagaagaggacag

SEQ ID NO: 547390 - RNA, 32 nt, Human
uuuuuaagcugcauacuugaggcuuaccuucu

SEQ ID NO: 547391 - RNA, 21 nt, Human
uuuuuaaggacccaaguuccu

SEQ ID NO: 547392 - RNA, 32 nt, Human
uuuuuaaggcugggaaccccuccuuccaucuu

SEQ ID NO: 547393 - RNA, 32 nt, Human
uuuuuaaggggcuguggggugaaauguugacu

SEQ ID NO: 547394 - RNA, 32 nt, Human
uuuuuaaggugaggacucagaaaaucaaaggg

SEQ ID NO: 547395 - RNA, 32 nt, Human
uuuuuaaguacugcaccaaaaccaaagagcug

SEQ ID NO: 547396 - RNA, 32 nt, Human
uuuuuaaguaugacagagcagggccuuaaucc

SEQ ID NO: 547397 - RNA, 32 nt, Human
uuuuuaaguggacuaaucagagcuguuaaugc

SEQ ID NO: 547398 - RNA, 32 nt, Human
uuuuuaauaacagcuuaaaacacacaucguac

SEQ ID NO: 547399 - RNA, 32 nt, Human
uuuuuaauaagaaacauuuaccaagggagcau

SEQ ID NO: 547400 - RNA, 32 nt, Human
uuuuuaauaccacagaaaucaccugaguguca

SEQ ID NO: 547401 - RNA, 32 nt, Human
uuuuuaauacuacuuuuuaaaaggaauuuaua

SEQ ID NO: 547402 - RNA, 32 nt, Human
uuuuuaaucucccauagugccuggcucacagg

SEQ ID NO: 547403 - RNA, 32 nt, Human
uuuuuaaucuucuuccuauguuuuggaauucu

SEQ ID NO: 547404 - RNA, 32 nt, Human
uuuuuaaugaauagggaccaaugccacauugc

SEQ ID NO: 547405 - RNA, 32 nt, Human
uuuuuaaugagagaaaaucuguucuuuccagc

SEQ ID NO: 547406 - RNA, 32 nt, Human
uuuuuaauguaaucauuugcauugguuaggaa

SEQ ID NO: 547407 - RNA, 32 nt, Human
uuuuuaauguuagguauuuguagcauaaggcc

SEQ ID NO: 547408 - RNA, 32 nt, Human
uuuuuaauuaaacuuuggaacagcgaauuugg

SEQ ID NO: 547409 - RNA, 27 nt, Human
uuuuuaauuaaacuuuggaacagugaa

SEQ ID NO: 547410 - RNA, 32 nt, Human
uuuuuaauuccugcugcacuaaagcuauuaca

SEQ ID NO: 547411 - RNA, 32 nt, Human
uuuuuaauugagauggagucuugcacugucac

SEQ ID NO: 547412 - RNA, 32 nt, Human
uuuuuaauugcaagcauauuucuuugaaugac

SEQ ID NO: 547413 - RNA, 32 nt, Human
uuuuuaauugccaaacugcucucuucaucagc

SEQ ID NO: 547414 - RNA, 32 nt, Human
uuuuuaauuuucccccagcucagaaucuugcu

SEQ ID NO: 547415 - RNA, 32 nt, Human
uuuuuaauuuucugagguuuuggaaguuguag

SEQ ID NO: 547416 - RNA, 32 nt, Human
uuuuuacaacccccuuaacaccuuuuggagau

SEQ ID NO: 547417 - RNA, 32 nt, Human
uuuuuacaaguuggcaaaaacagacuuccggg

SEQ ID NO: 547418 - RNA, 32 nt, Human
uuuuuacaauaauguaaaaauuaaacuguuua

SEQ ID NO: 547419 - RNA, 32 nt, Human
uuuuuacacaaaacaagggcuuagaguauacu

SEQ ID NO: 547420 - RNA, 32 nt, Human
uuuuuacacuccuuaaaacaguuuuuaagucg

SEQ ID NO: 547421 - RNA, 32 nt, Human
uuuuuacagaccaugaaauggaggcucagggg

SEQ ID NO: 547422 - RNA, 32 nt, Human
uuuuuacagauagggaaauagcacagaaaggu

SEQ ID NO: 547423 - RNA, 32 nt, Human
uuuuuacagcacaaacaacugcauacggcccg

SEQ ID NO: 547424 - RNA, 32 nt, Human
uuuuuacagcacacacuuccauaugucauugc

SEQ ID NO: 547425 - RNA, 32 nt, Human
uuuuuacagcccacccugcucuccuccccuau

SEQ ID NO: 547426 - RNA, 32 nt, Human
uuuuuacaucucucucacccuucuacuuccua

SEQ ID NO: 547427 - RNA, 32 nt, Human
uuuuuacaugccacagcucagcugucugccug

SEQ ID NO: 547428 - RNA, 32 nt, Human
uuuuuacauguuacauguccucauguuuucug

SEQ ID NO: 547429 - RNA, 32 nt, Human
uuuuuacauuggucaguacacaggucaggagc

SEQ ID NO: 547430 - RNA, 32 nt, Human
uuuuuaccaaagugucuuuugacauuuuauuu

SEQ ID NO: 547431 - RNA, 32 nt, Human
uuuuuaccaaauucacugucucucuuaccugu

SEQ ID NO: 547432 - RNA, 32 nt, Human
uuuuuaccacccuaccuuuauuguuagugguu

SEQ ID NO: 547433 - RNA, 32 nt, Human
uuuuuaccauaccaacuucucucccaucucua

SEQ ID NO: 547434 - RNA, 22 nt, Human
uuuuuacccaggcuggagugca

SEQ ID NO: 547435 - RNA, 32 nt, Human
uuuuuacccaggcuggagugcaaugaugcgau

SEQ ID NO: 547436 - RNA, 32 nt, Human
uuuuuacccuagauguucccaccuucagugcu

SEQ ID NO: 547437 - RNA, 32 nt, Human
uuuuuacccugaggggcucagcacucauuagg

SEQ ID NO: 547438 - RNA, 32 nt, Human
uuuuuacccugccccugccuugauuagacucc

SEQ ID NO: 547439 - RNA, 32 nt, Human
uuuuuaccuaguugcuauagugucuacagucu

SEQ ID NO: 547440 - RNA, 32 nt, Human
uuuuuaccuccugucuugcccccuaaaagaaa

SEQ ID NO: 547441 - RNA, 32 nt, Human
uuuuuaccugucuuuauucaaauguucuaaua

SEQ ID NO: 547442 - RNA, 32 nt, Human
uuuuuaccuuuguuccuuuugcucugauagac

SEQ ID NO: 547443 - RNA, 32 nt, Human
uuuuuacggacugaaugauguucuccaaaauu

SEQ ID NO: 547444 - RNA, 32 nt, Human
uuuuuacucuauaauuugauaguuacaguuuu

SEQ ID NO: 547445 - RNA, 32 nt, Human
uuuuuacucuuuguugacuuugcugcuuauug

SEQ ID NO: 547446 - RNA, 32 nt, Human
uuuuuacugccucauugucuucuguacaucuu

SEQ ID NO: 547447 - RNA, 32 nt, Human
uuuuuacuguccuuaccagcaacaguuugcgu

SEQ ID NO: 547448 - RNA, 32 nt, Human
uuuuuacugucucuucugcuuacuuuccacau

SEQ ID NO: 547449 - RNA, 32 nt, Human
uuuuuacuugugaggaaugagaagccauccau

SEQ ID NO: 547450 - RNA, 32 nt, Human
uuuuuacuuuuaagucacuuuuggguucacua

SEQ ID NO: 547451 - RNA, 32 nt, Human
uuuuuagaaaacagaaaugcccuugauggugg

SEQ ID NO: 547452 - RNA, 32 nt, Human
uuuuuagaaaguauauuuuuguaugcuuuguu

SEQ ID NO: 547453 - RNA, 32 nt, Human
uuuuuagaaauccaguuuuaguuuugucauuu

SEQ ID NO: 547454 - RNA, 32 nt, Human
uuuuuagaaauguuauuuucccugugauagag

SEQ ID NO: 547455 - RNA, 32 nt, Human
uuuuuagaccaccacauggcaugcuugacuau

SEQ ID NO: 547456 - RNA, 32 nt, Human
uuuuuagaccucuaucaaucaguaguuagcau

SEQ ID NO: 547457 - RNA, 23 nt, Human
uuuuuagacggagucucacucug

SEQ ID NO: 547458 - RNA, 32 nt, Human
uuuuuagacuauuuaucuuccuucccuucccc

SEQ ID NO: 547459 - RNA, 32 nt, Human
uuuuuagagaaagggucucacuauguugccca

SEQ ID NO: 547460 - RNA, 32 nt, Human
uuuuuagagacagagcuucuccauguugccca

SEQ ID NO: 547461 - RNA, 32 nt, Human
uuuuuagagacagggauucaacauguugguua

SEQ ID NO: 547462 - RNA, 32 nt, Human
uuuuuagagacagggccuugcucuguugccug

SEQ ID NO: 547463 - RNA, 32 nt, Human
uuuuuagagacagggucucacuauaaugcuua

SEQ ID NO: 547464 - RNA, 32 nt, Human
uuuuuagagacagggucucacuauauugcuca

SEQ ID NO: 547465 - RNA, 32 nt, Human
uuuuuagagacagggucucacucuguugccca

SEQ ID NO: 547466 - RNA, 32 nt, Human
uuuuuagagacagggucuugcuauguugccca

SEQ ID NO: 547467 - RNA, 32 nt, Human
uuuuuagagacagggucuugcuauguugguca

SEQ ID NO: 547468 - RNA, 32 nt, Human
uuuuuagagacagggucuugcucugucaccca

SEQ ID NO: 547469 - RNA, 32 nt, Human
uuuuuagagacagggucuugcucugucgcuca

SEQ ID NO: 547470 - RNA, 32 nt, Human
uuuuuagagacagggucuugcucugucuccua

SEQ ID NO: 547471 - RNA, 32 nt, Human
uuuuuagagcaaauguuauggguucuuaccca

SEQ ID NO: 547472 - RNA, 32 nt, Human
uuuuuagagcaguuucauguuuacagagaaau

SEQ ID NO: 547473 - RNA, 32 nt, Human
uuuuuagagccagucaaaugguauuuaaguua

SEQ ID NO: 547474 - RNA, 32 nt, Human
uuuuuagagggaggaaucaguguuggauugca

SEQ ID NO: 547475 - RNA, 32 nt, Human
uuuuuagauaaauauguauaucaauauuuuaa

SEQ ID NO: 547476 - RNA, 32 nt, Human
uuuuuagaugaccacucaacauaaugcuuaag

SEQ ID NO: 547477 - RNA, 32 nt, Human
uuuuuagauggaaucuuguucucuugcccagg

SEQ ID NO: 547478 - RNA, 32 nt, Human
uuuuuagauggaauuucacucuuguugcccag

SEQ ID NO: 547479 - RNA, 32 nt, Human
uuuuuagcaaaauguaaugaaauaucagguug

SEQ ID NO: 547480 - RNA, 25 nt, Human
uuuuuagcaauggagucucacucug

SEQ ID NO: 547481 - RNA, 32 nt, Human
uuuuuagcacucaucaguauucuccaauguga

SEQ ID NO: 547482 - RNA, 32 nt, Human
uuuuuagcauuacguaucuguguguuacugcu

SEQ ID NO: 547483 - RNA, 32 nt, Human
uuuuuagcauucagucauauaacaucugguua

SEQ ID NO: 547484 - RNA, 32 nt, Human
uuuuuagcauugccuuuccagucuugaugauu

SEQ ID NO: 547485 - RNA, 32 nt, Human
uuuuuagccagcggggccacugacggcuucug

SEQ ID NO: 547486 - RNA, 32 nt, Human
uuuuuagccuucuuuuucugcacugagucuca

SEQ ID NO: 547487 - RNA, 32 nt, Human
uuuuuagcuagcaacauauuugaaucaggcug

SEQ ID NO: 547488 - RNA, 32 nt, Human
uuuuuagcuuugacaaacacacaaaaguggua

SEQ ID NO: 547489 - RNA, 32 nt, Human
uuuuuaggaaggauuuucuuuuuaacuuuacc

SEQ ID NO: 547490 - RNA, 32 nt, Human
uuuuuaggagauggucuugcucugucacucag

SEQ ID NO: 547491 - RNA, 32 nt, Human
uuuuuaggccagcuuuaauuuaauggcccuac

SEQ ID NO: 547492 - RNA, 32 nt, Human
uuuuuaggccucuucucagcacacuguuccaa

SEQ ID NO: 547493 - RNA, 32 nt, Human
uuuuuaggcugaaguagagaacaugaaucauu

SEQ ID NO: 547494 - RNA, 21 nt, Human
uuuuuaggcugggcgcagugg

SEQ ID NO: 547495 - RNA, 19 nt, Human
uuuuuagggaggaaugccu

SEQ ID NO: 547496 - RNA, 32 nt, Human
uuuuuagggugagguguagggggucuuuugcu

SEQ ID NO: 547497 - RNA, 32 nt, Human
uuuuuagguuuuucuuucacauagacgggguc

SEQ ID NO: 547498 - RNA, 32 nt, Human
uuuuuaguacuugcugaagaaugauucagggu

SEQ ID NO: 547499 - RNA, 32 nt, Human
uuuuuaguagugggauuuccaucuacaaaaua

SEQ ID NO: 547500 - RNA, 32 nt, Human
uuuuuaguauaucuugucgaucuuuaaguugu

SEQ ID NO: 547501 - RNA, 31 nt, Human
uuuuuagugcaucguccaugccaaagugugc

SEQ ID NO: 547502 - RNA, 32 nt, Human
uuuuuauaaagagagauucuuauuuucuuggc

SEQ ID NO: 547503 - RNA, 32 nt, Human
uuuuuauaaguuauacauguaugcauguauac

SEQ ID NO: 547504 - RNA, 32 nt, Human
uuuuuauaaugucuuuuuggagaaauugccga

SEQ ID NO: 547505 - RNA, 32 nt, Human
uuuuuauacaauuguguauuuauagggauacc

SEQ ID NO: 547506 - RNA, 32 nt, Human
uuuuuauacaccauuguuccuuaccuuuacau

SEQ ID NO: 547507 - RNA, 32 nt, Human
uuuuuauacagcaacagaaaacuaaacacaca

SEQ ID NO: 547508 - RNA, 32 nt, Human
uuuuuauaccaguuuuggagacugccugagau

SEQ ID NO: 547509 - RNA, 32 nt, Human
uuuuuauauucuuuaguaaagacaggguuucu

SEQ ID NO: 547510 - RNA, 32 nt, Human
uuuuuauauuuuuaauagagacgggguuucac

SEQ ID NO: 547511 - RNA, 32 nt, Human
uuuuuauauuuuuaguagagacaggguuucac

SEQ ID NO: 547512 - RNA, 32 nt, Human
uuuuuauauuuuuaguagagauggggacuuca

SEQ ID NO: 547513 - RNA, 32 nt, Human
uuuuuauauuuuuaguagagaugggguuucac

SEQ ID NO: 547514 - RNA, 32 nt, Human
uuuuuauauuuuuaguagagaugggguuuugc

SEQ ID NO: 547515 - RNA, 32 nt, Human
uuuuuauauuuuuaguggagaugggguuuugu

SEQ ID NO: 547516 - RNA, 31 nt, Human
uuuuuaucaauaaauacuuguugauuguggu

SEQ ID NO: 547517 - RNA, 32 nt, Human
uuuuuaucacacuuauaggccaagugugauaa

SEQ ID NO: 547518 - RNA, 32 nt, Human
uuuuuaucaccagcaaaggcuaagauaaugua

SEQ ID NO: 547519 - RNA, 32 nt, Human
uuuuuaucauggaccagaacaucugucaugca

SEQ ID NO: 547520 - RNA, 32 nt, Human
uuuuuauccauagcuuuuuccauauaaguaug

SEQ ID NO: 547521 - RNA, 32 nt, Human
uuuuuauccuuggcacuauaccaaaauccaac

SEQ ID NO: 547522 - RNA, 32 nt, Human
uuuuuaucuccaaagauuuacaaauauuaaaa

SEQ ID NO: 547523 - RNA, 22 nt, Human
uuuuuaucucucucaacuuccu

SEQ ID NO: 547524 - RNA, 32 nt, Human
uuuuuaucucucucaacuuccugcacuuaaca

SEQ ID NO: 547525 - RNA, 32 nt, Human
uuuuuaucucugaagggcaguagccugaagau

SEQ ID NO: 547526 - RNA, 32 nt, Human
uuuuuaugagcacacuaauuccucacuuaagg

SEQ ID NO: 547527 - RNA, 32 nt, Human
uuuuuaugccucucccuggcauucuccauaaa

SEQ ID NO: 547528 - RNA, 32 nt, Human
uuuuuaugcuucugguauugcuuuauaaaaga

SEQ ID NO: 547529 - RNA, 32 nt, Human
uuuuuauggaguuucauguuguccacuauagc

SEQ ID NO: 547530 - RNA, 32 nt, Human
uuuuuauggauggcucccuucccccauucgcc

SEQ ID NO: 547531 - RNA, 32 nt, Human
uuuuuauguaaaauagcguagaugcaucucug

SEQ ID NO: 547532 - RNA, 32 nt, Human
uuuuuaugugaagcccccucugcuuuucagcu

SEQ ID NO: 547533 - RNA, 32 nt, Human
uuuuuauguucuuugacccacaccaucaacac

SEQ ID NO: 547534 - RNA, 32 nt, Human
uuuuuauuaagaaaucagaucccagggugaga

SEQ ID NO: 547535 - RNA, 32 nt, Human
uuuuuauuacuuuugcgugaauuuauuuaaca

SEQ ID NO: 547536 - RNA, 32 nt, Human
uuuuuauuagagacaagggcuccccauguugc

SEQ ID NO: 547537 - RNA, 32 nt, Human
uuuuuauuagggauuuuaaaaggggaggggug

SEQ ID NO: 547538 - RNA, 32 nt, Human
uuuuuauucacuguagugugguggacgguggu

SEQ ID NO: 547539 - RNA, 32 nt, Human
uuuuuauuccuuaaauguaaaaugacuaccua

SEQ ID NO: 547540 - RNA, 32 nt, Human
uuuuuauucucagagcaucagcacuugaggcc

SEQ ID NO: 547541 - RNA, 32 nt, Human
uuuuuauucuuuagucccuguugucuuuaauu

SEQ ID NO: 547542 - RNA, 32 nt, Human
uuuuuauugcagaauaauguuccaggguaugg

SEQ ID NO: 547543 - RNA, 32 nt, Human
uuuuuauugcuauuucuaaauuuccuuggcuu

SEQ ID NO: 547544 - RNA, 32 nt, Human
uuuuuauuuaguguuuucucagucacaauuuu

SEQ ID NO: 547545 - RNA, 32 nt, Human
uuuuuauuucuagaagacauuuuacuaggcaa

SEQ ID NO: 547546 - RNA, 32 nt, Human
uuuuuauuucuuucuuuuccauggaggccuag

SEQ ID NO: 547547 - RNA, 32 nt, Human
uuuuuauuugaaccuuuggaacuugggaguuc

SEQ ID NO: 547548 - RNA, 23 nt, Human
uuuuuauuuguuucaauguuccu

SEQ ID NO: 547549 - RNA, 32 nt, Human
uuuuuauuuucagcacugcagcucugaugguc

SEQ ID NO: 547550 - RNA, 32 nt, Human
uuuuuauuuuugcacaacuuuugagaguauag

SEQ ID NO: 547551 - RNA, 32 nt, Human
uuuuucaaaacaauguugaagagugaugacag

SEQ ID NO: 547552 - RNA, 32 nt, Human
uuuuucaaaagaugcucucugcagcaguaaga

SEQ ID NO: 547553 - RNA, 32 nt, Human
uuuuucaaaccacagaccagaacugguugcau

SEQ ID NO: 547554 - RNA, 32 nt, Human
uuuuucaaagcuggguguugggaccaacauca

SEQ ID NO: 547555 - RNA, 32 nt, Human
uuuuucaacauguagggcaagaggaugaagga

SEQ ID NO: 547556 - RNA, 32 nt, Human
uuuuucaacuaguguuucaacagguuuauuua

SEQ ID NO: 547557 - RNA, 32 nt, Human
uuuuucaagacagggucucaacucuguuaccc

SEQ ID NO: 547558 - RNA, 32 nt, Human
uuuuucaagauccaaggcacaauaggcauaaa

SEQ ID NO: 547559 - RNA, 24 nt, Human
uuuuucaagcucuaccaugcuuug

SEQ ID NO: 547560 - RNA, 32 nt, Human
uuuuucaauguauacuuucacuuuccaaaugc

SEQ ID NO: 547561 - RNA, 32 nt, Human
uuuuucaauuuuuccuuguucuugucaaaggc

SEQ ID NO: 547562 - RNA, 32 nt, Human
uuuuucacaagaacugggucuccagcacucac

SEQ ID NO: 547563 - RNA, 32 nt, Human
uuuuucacaaugauuaaugaacaaaaacaaag

SEQ ID NO: 547564 - RNA, 32 nt, Human
uuuuucacacucgcagcucucccuccucaggc

SEQ ID NO: 547565 - RNA, 32 nt, Human
uuuuucacagccgagaaacagugcagcaguau

SEQ ID NO: 547566 - RNA, 32 nt, Human
uuuuucacagcucuugaguauuuucuauuuuu

SEQ ID NO: 547567 - RNA, 32 nt, Human
uuuuucacaguggccucacuacgcccaucucc

SEQ ID NO: 547568 - RNA, 32 nt, Human
uuuuucaccaaacugucucugccucuuccugg

SEQ ID NO: 547569 - RNA, 32 nt, Human
uuuuucaccaaacugucucugccucuucucag

SEQ ID NO: 547570 - RNA, 32 nt, Human
uuuuucaccaauauuucucagacaucgguuca

SEQ ID NO: 547571 - RNA, 32 nt, Human
uuuuucaccagaggauccagauuucccugugg

SEQ ID NO: 547572 - RNA, 32 nt, Human
uuuuucacccuuuggaaucauaguauggguag

SEQ ID NO: 547573 - RNA, 32 nt, Human
uuuuucacuccaccaaaucuuacaaaucauug

SEQ ID NO: 547574 - RNA, 32 nt, Human
uuuuucacucugcagugugauuggacugccag

SEQ ID NO: 547575 - RNA, 32 nt, Human
uuuuucacugcucugugccuguccguauaagc

SEQ ID NO: 547576 - RNA, 32 nt, Human
uuuuucacuguaucaaacaaugucagugcuuu

SEQ ID NO: 547577 - RNA, 32 nt, Human
uuuuucacugucuuuuucuuuucgcggggaac

SEQ ID NO: 547578 - RNA, 32 nt, Human
uuuuucacuucuccccacaucucccuuuccac

SEQ ID NO: 547579 - RNA, 32 nt, Human
uuuuucagaaaauauuuaauuucuucauaaaa

SEQ ID NO: 547580 - RNA, 32 nt, Human
uuuuucagaacucauagauaaauaugaaugua

SEQ ID NO: 547581 - RNA, 32 nt, Human
uuuuucagacagagucucgcucuguugcccag

SEQ ID NO: 547582 - RNA, 32 nt, Human
uuuuucagacugauccuuucucugccuguauu

SEQ ID NO: 547583 - RNA, 32 nt, Human
uuuuucagauaaggagaauuagacucccaagu

SEQ ID NO: 547584 - RNA, 32 nt, Human
uuuuucagaucaaaaccauucuguaaaaucuu

SEQ ID NO: 547585 - RNA, 32 nt, Human
uuuuucagauggaguuuuguucuuguugccca

SEQ ID NO: 547586 - RNA, 32 nt, Human
uuuuucagauggccacggugagggcuuggaag

SEQ ID NO: 547587 - RNA, 32 nt, Human
uuuuucagauugacuagaccaagcagaaucuc

SEQ ID NO: 547588 - RNA, 32 nt, Human
uuuuucagauugacuaggccaagcagaaucuc

SEQ ID NO: 547589 - RNA, 32 nt, Human
uuuuucagauuucucuggaauccccuuggcca

SEQ ID NO: 547590 - RNA, 32 nt, Human
uuuuucagcaaaugccugguucugaaggguca

SEQ ID NO: 547591 - RNA, 32 nt, Human
uuuuucagccccggagaggguccugaccuggg

SEQ ID NO: 547592 - RNA, 32 nt, Human
uuuuucagcuccauuguaaucuuacgggauca

SEQ ID NO: 547593 - RNA, 32 nt, Human
uuuuucagcuugcaaaaugggacugcaauauu

SEQ ID NO: 547594 - RNA, 32 nt, Human
uuuuucaggaaggcgaccggcagccucgggca

SEQ ID NO: 547595 - RNA, 32 nt, Human
uuuuucagggucuuauucugucacccaggcug

SEQ ID NO: 547596 - RNA, 32 nt, Human
uuuuucaguagagaccgggucuugccaugcug

SEQ ID NO: 547597 - RNA, 32 nt, Human
uuuuucaguccagguuggagaucguagcugcu

SEQ ID NO: 547598 - RNA, 32 nt, Human
uuuuucauaaaugaucuauaucaggcugaaua

SEQ ID NO: 547599 - RNA, 32 nt, Human
uuuuucaucacugagcauuguugaucuaugcc

SEQ ID NO: 547600 - RNA, 32 nt, Human
uuuuucauccacugcaggaauguggccacagg

SEQ ID NO: 547601 - RNA, 32 nt, Human
uuuuucauccuuacaauccugucccaugguau

SEQ ID NO: 547602 - RNA, 32 nt, Human
uuuuucaucugggaugaaaaagccugguucuc

SEQ ID NO: 547603 - RNA, 32 nt, Human
uuuuucaucuguacccuacucacacacucccc

SEQ ID NO: 547604 - RNA, 32 nt, Human
uuuuucaucugugucuucucaacacccagcac

SEQ ID NO: 547605 - RNA, 32 nt, Human
uuuuucauuuacccuauaugaagaaaacuaaa

SEQ ID NO: 547606 - RNA, 32 nt, Human
uuuuucauuuuugguagagacaggguuuugcc

SEQ ID NO: 547607 - RNA, 32 nt, Human
uuuuuccaaacaguagguuucauccaagacca

SEQ ID NO: 547608 - RNA, 32 nt, Human
uuuuuccaacuuauacuaaagagcuagcauau

SEQ ID NO: 547609 - RNA, 32 nt, Human
uuuuuccacagacuugcugggacuagcuuuca

SEQ ID NO: 547610 - RNA, 32 nt, Human
uuuuuccacaucuguagugccaugaagcgauu

SEQ ID NO: 547611 - RNA, 32 nt, Human
uuuuuccacaugcaugaaaauauguauuaauc

SEQ ID NO: 547612 - RNA, 32 nt, Human
uuuuuccacuuuaucgugcagcaagaguaaag

SEQ ID NO: 547613 - RNA, 32 nt, Human
uuuuuccacuuuggaaaaugucacugugacaa

SEQ ID NO: 547614 - RNA, 32 nt, Human
uuuuuccagauucuuccacuggcuccacaucc

SEQ ID NO: 547615 - RNA, 32 nt, Human
uuuuuccagccaagcagcagcuuuauuagugg

SEQ ID NO: 547616 - RNA, 32 nt, Human
uuuuuccaggcugucugugaagccuggggaac

SEQ ID NO: 547617 - RNA, 32 nt, Human
uuuuuccagggaggggugggagagggaauuua

SEQ ID NO: 547618 - RNA, 32 nt, Human
uuuuuccagguuccugagcccuacugugucuc

SEQ ID NO: 547619 - RNA, 32 nt, Human
uuuuuccagugaaacaaaacguaagaaucuga

SEQ ID NO: 547620 - RNA, 32 nt, Human
uuuuuccagugcccagaggccugguggagcca

SEQ ID NO: 547621 - RNA, 32 nt, Human
uuuuuccauauguauauaguaaaauauguuac

SEQ ID NO: 547622 - RNA, 32 nt, Human
uuuuuccauccagcaacauccagacgauuuca

SEQ ID NO: 547623 - RNA, 32 nt, Human
uuuuuccaucucccuucucccuugucaucaga

SEQ ID NO: 547624 - RNA, 32 nt, Human
uuuuuccaucuuaugaauucagaagaagcuug

SEQ ID NO: 547625 - RNA, 32 nt, Human
uuuuuccaucuugggcaggaauggguggcaua

SEQ ID NO: 547626 - RNA, 32 nt, Human
uuuuuccauuuaggaggguauucugggccuuc

SEQ ID NO: 547627 - RNA, 32 nt, Human
uuuuucccaagucccuaggugcugccagugcu

SEQ ID NO: 547628 - RNA, 32 nt, Human
uuuuucccagaacacuucacauggagcagcga

SEQ ID NO: 547629 - RNA, 20 nt, Human
uuuuucccagccaccccucc

SEQ ID NO: 547630 - RNA, 32 nt, Human
uuuuucccaguaaaugaggcaagcaauucuaa

SEQ ID NO: 547631 - RNA, 32 nt, Human
uuuuucccaguaaaugaggcaggcaauucuaa

SEQ ID NO: 547632 - RNA, 32 nt, Human
uuuuucccaucccuucuucuugcucagagagg

SEQ ID NO: 547633 - RNA, 32 nt, Human
uuuuuccccaacagaccugucuucacccuugg

SEQ ID NO: 547634 - RNA, 32 nt, Human
uuuuuccccacaaauaaauuaucagguuaaac

SEQ ID NO: 547635 - RNA, 32 nt, Human
uuuuuccccaggagcggggccugggagcugag

SEQ ID NO: 547636 - RNA, 32 nt, Human
uuuuucccccuccccgggggccaagggcuccg

SEQ ID NO: 547637 - RNA, 32 nt, Human
uuuuucccccuccuccccuccuuucuguccuc

SEQ ID NO: 547638 - RNA, 32 nt, Human
uuuuuccccuacuguuuccuuugggaauuuac

SEQ ID NO: 547639 - RNA, 32 nt, Human
uuuuuccccugccaaucucucuagcacugguu

SEQ ID NO: 547640 - RNA, 32 nt, Human
uuuuuccccuuagaugccuggaagugguauuu

SEQ ID NO: 547641 - RNA, 32 nt, Human
uuuuuccccuucucuuaaaaccacagaggacc

SEQ ID NO: 547642 - RNA, 32 nt, Human
uuuuucccucccccaccuuucaccccacagug

SEQ ID NO: 547643 - RNA, 32 nt, Human
uuuuucccuggaagugacuuuccucuuuugca

SEQ ID NO: 547644 - RNA, 32 nt, Human
uuuuuccgcagcugcaucuuucugccuggacu

SEQ ID NO: 547645 - RNA, 32 nt, Human
uuuuuccuaaccuuuugcuauuauaaauaaug

SEQ ID NO: 547646 - RNA, 32 nt, Human
uuuuuccuaccauuucuauuucauacauucuc

SEQ ID NO: 547647 - RNA, 16 nt, Human
uuuuuccuaugcagug

SEQ ID NO: 547648 - RNA, 32 nt, Human
uuuuuccuaugcauacauaccugugauuaagu

SEQ ID NO: 547649 - RNA, 32 nt, Human
uuuuuccuccccuccuccuccucuccaauucg

SEQ ID NO: 547650 - RNA, 32 nt, Human
uuuuuccucccugccccucucucccucugccc

SEQ ID NO: 547651 - RNA, 32 nt, Human
uuuuuccucuacugacuucucuccauacucuu

SEQ ID NO: 547652 - RNA, 32 nt, Human
uuuuuccucuaggagaauacaagccuuaauaa

SEQ ID NO: 547653 - RNA, 32 nt, Human
uuuuuccugcaacccaccagaccccaggccuc

SEQ ID NO: 547654 - RNA, 32 nt, Human
uuuuuccugcagcgcgugcgugcugcgcuacu

SEQ ID NO: 547655 - RNA, 32 nt, Human
uuuuuccugcauucuguggauccuagcagaua

SEQ ID NO: 547656 - RNA, 32 nt, Human
uuuuuccugccugagucuugcauaucugugaa

SEQ ID NO: 547657 - RNA, 32 nt, Human
uuuuuccuggcacaucacucaacuacuauuag

SEQ ID NO: 547658 - RNA, 32 nt, Human
uuuuuccugggaacgcgcugaauggaguccag

SEQ ID NO: 547659 - RNA, 32 nt, Human
uuuuuccuguggauauuucuccauccuaaaaa

SEQ ID NO: 547660 - RNA, 32 nt, Human
uuuuuccuguguauuaaaccuuuccauuuuac

SEQ ID NO: 547661 - RNA, 32 nt, Human
uuuuuccuuaucuuguuuuccacaauucacaa

SEQ ID NO: 547662 - RNA, 32 nt, Human
uuuuuccuucaagaaugcaguacuaacauuua

SEQ ID NO: 547663 - RNA, 32 nt, Human
uuuuuccuucaagguucauccauguuguucca

SEQ ID NO: 547664 - RNA, 32 nt, Human
uuuuuccuucucuucucucucuuuuccuaggu

SEQ ID NO: 547665 - RNA, 32 nt, Human
uuuuuccuucuucaggguggcuguaauuccag

SEQ ID NO: 547666 - RNA, 32 nt, Human
uuuuuccuucuuuccuuucuucuuucucuuuc

SEQ ID NO: 547667 - RNA, 32 nt, Human
uuuuuccuugcagccgcugaggaggcgauaaa

SEQ ID NO: 547668 - RNA, 32 nt, Human
uuuuuccuuguuuuucucuuuuuaaagaccaa

SEQ ID NO: 547669 - RNA, 32 nt, Human
uuuuuccuuuaccucauaugcagcugugguag

SEQ ID NO: 547670 - RNA, 32 nt, Human
uuuuuccuuuacucaaaacaaaacaauuuuua

SEQ ID NO: 547671 - RNA, 32 nt, Human
uuuuuccuuuucucccuccgggucuccuuuuu

SEQ ID NO: 547672 - RNA, 32 nt, Human
uuuuuccuuuuguguucugucaccaacugaag

SEQ ID NO: 547673 - RNA, 32 nt, Human
uuuuucgaacaaggugucuggucuuuucugga

SEQ ID NO: 547674 - RNA, 32 nt, Human
uuuuucgagacaggaucucacucuguugccca

SEQ ID NO: 547675 - RNA, 32 nt, Human
uuuuucgagacagggucuugcucugucaccua

SEQ ID NO: 547676 - RNA, 32 nt, Human
uuuuucgcaguggccuccugcauuucaugaag

SEQ ID NO: 547677 - RNA, 32 nt, Human
uuuuucgcaucauuaucuugugccucauucau

SEQ ID NO: 547678 - RNA, 32 nt, Human
uuuuucgccauguugcccaggcuggucuugaa

SEQ ID NO: 547679 - RNA, 32 nt, Human
uuuuucggaaagugcuuuuggccgggagugcc

SEQ ID NO: 547680 - RNA, 32 nt, Human
uuuuucggaggagccgagggaggcugagcggu

SEQ ID NO: 547681 - RNA, 32 nt, Human
uuuuucguauuuuuaguaaagacaggguuuca

SEQ ID NO: 547682 - RNA, 32 nt, Human
uuuuucguguuuuugacauuccuugaaucugu

SEQ ID NO: 547683 - RNA, 32 nt, Human
uuuuucuaaaauccaacuucugaccgcccagu

SEQ ID NO: 547684 - RNA, 24 nt, Human
uuuuucuaaauacaguguuuuuca

SEQ ID NO: 547685 - RNA, 32 nt, Human
uuuuucuaaccucagauaagugcagugucuuu

SEQ ID NO: 547686 - RNA, 32 nt, Human
uuuuucuaaggguuucgugucccucuuuuauc

SEQ ID NO: 547687 - RNA, 32 nt, Human
uuuuucuaauggcuucucuauaucuuuuacau

SEQ ID NO: 547688 - RNA, 32 nt, Human
uuuuucuacauacuuuuuacacagauucuaug

SEQ ID NO: 547689 - RNA, 32 nt, Human
uuuuucuacauccugaacuauuuuuccuauuu

SEQ ID NO: 547690 - RNA, 32 nt, Human
uuuuucuacuucucaauuugaugguucgauua

SEQ ID NO: 547691 - RNA, 21 nt, Human
uuuuucuagaugguuuuuuca

SEQ ID NO: 547692 - RNA, 32 nt, Human
uuuuucuagcuacaauaucuucauacaaugac

SEQ ID NO: 547693 - RNA, 32 nt, Human
uuuuucuagcuagacuguaaacuccuuaagga

SEQ ID NO: 547694 - RNA, 32 nt, Human
uuuuucuagcuuccauccuuucucccucguuu

SEQ ID NO: 547695 - RNA, 32 nt, Human
uuuuucuauagcccuggcacugggcacagagc

SEQ ID NO: 547696 - RNA, 32 nt, Human
uuuuucuaucaauuuucccccaucccaucccc

SEQ ID NO: 547697 - RNA, 32 nt, Human
uuuuucuauguacuggauauuuuugcauauaa

SEQ ID NO: 547698 - RNA, 32 nt, Human
uuuuucuauuaagaauacaaaugcugggcugg

SEQ ID NO: 547699 - RNA, 32 nt, Human
uuuuucuauuaagccauugaaagagaagcacu

SEQ ID NO: 547700 - RNA, 32 nt, Human
uuuuucuauuuuuaguagagacaggguuucac

SEQ ID NO: 547701 - RNA, 32 nt, Human
uuuuucuauuuuuaguagagaugggguuucgc

SEQ ID NO: 547702 - RNA, 32 nt, Human
uuuuucuauuuuuauuauuuuagagaugggga

SEQ ID NO: 547703 - RNA, 32 nt, Human
uuuuucucaaucucccagccccucucuaccau

SEQ ID NO: 547704 - RNA, 32 nt, Human
uuuuucucacguuucacaucucacucaucacc

SEQ ID NO: 547705 - RNA, 32 nt, Human
uuuuucucagcccacguguucucccccacgug

SEQ ID NO: 547706 - RNA, 32 nt, Human
uuuuucucaguuaccugcaugaauaaauaaug

SEQ ID NO: 547707 - RNA, 32 nt, Human
uuuuucucauccaucacacuccugccuuaacu

SEQ ID NO: 547708 - RNA, 32 nt, Human
uuuuucucauucuccauaccucccccaagcuc

SEQ ID NO: 547709 - RNA, 32 nt, Human
uuuuucucauuugucuguggcauuggagaaua

SEQ ID NO: 547710 - RNA, 32 nt, Human
uuuuucuccaauuuggcugggauuauucaaag

SEQ ID NO: 547711 - RNA, 32 nt, Human
uuuuucucccccaagugagcugcaagaggccc

SEQ ID NO: 547712 - RNA, 32 nt, Human
uuuuucucccccuucaccaggguggguggaau

SEQ ID NO: 547713 - RNA, 32 nt, Human
uuuuucuccccuuccuccuuacccucccuccc

SEQ ID NO: 547714 - RNA, 32 nt, Human
uuuuucucccucuccaccaggguggguggaau

SEQ ID NO: 547715 - RNA, 19 nt, Human
uuuuucuccgcuugcugug

SEQ ID NO: 547716 - RNA, 32 nt, Human
uuuuucuccugacuugaacauagggugacuuu

SEQ ID NO: 547717 - RNA, 32 nt, Human
uuuuucuccugccuucuccuggagaugaagag

SEQ ID NO: 547718 - RNA, 32 nt, Human
uuuuucuccuuuccuuucauuccaaaaagccu

SEQ ID NO: 547719 - RNA, 32 nt, Human
uuuuucucuaaguucuuaacauguuauguccc

SEQ ID NO: 547720 - RNA, 32 nt, Human
uuuuucucuaauuggucgccucccaccagacu

SEQ ID NO: 547721 - RNA, 32 nt, Human
uuuuucucucauccuucuaccucccuccuuug

SEQ ID NO: 547722 - RNA, 32 nt, Human
uuuuucucucauuuucuucccucucucccucc

SEQ ID NO: 547723 - RNA, 32 nt, Human
uuuuucucugcagauaguugcuucucuugcuu

SEQ ID NO: 547724 - RNA, 32 nt, Human
uuuuucucugugagccgcugccuccagggcca

SEQ ID NO: 547725 - RNA, 32 nt, Human
uuuuucucuguggcuguauguggguugcuugg

SEQ ID NO: 547726 - RNA, 32 nt, Human
uuuuucucuucuccucuuccuggcuguguuuu

SEQ ID NO: 547727 - RNA, 32 nt, Human
uuuuucucuuguaaacaaaccccagcuuguuu

SEQ ID NO: 547728 - RNA, 32 nt, Human
uuuuucucuuucuccuccuggccuggccugaa

SEQ ID NO: 547729 - RNA, 32 nt, Human
uuuuucucuuucuguccuuuuucuugcugauu

SEQ ID NO: 547730 - RNA, 24 nt, Human
uuuuucugaagacagucuuuuuca

SEQ ID NO: 547731 - RNA, 32 nt, Human
uuuuucugacuuuuuaaaucauuaucauuauu

SEQ ID NO: 547732 - RNA, 32 nt, Human
uuuuucugaguauaauguuauuacaugguccu

SEQ ID NO: 547733 - RNA, 32 nt, Human
uuuuucugccagugucuugucugaaggcagac

SEQ ID NO: 547734 - RNA, 32 nt, Human
uuuuucugcccaguggcucugaugggggcuca

SEQ ID NO: 547735 - RNA, 32 nt, Human
uuuuucugcccucccuauuuuaacuagaugau

SEQ ID NO: 547736 - RNA, 32 nt, Human
uuuuucugccuccacauugggaggggaggacu

SEQ ID NO: 547737 - RNA, 32 nt, Human
uuuuucugcgggaguagguggggagaaacuua

SEQ ID NO: 547738 - RNA, 32 nt, Human
uuuuucugcuaagcacaaaaugaacgcaaagc

SEQ ID NO: 547739 - RNA, 32 nt, Human
uuuuucugcuguucuuggcccaaguucuuucc

SEQ ID NO: 547740 - RNA, 32 nt, Human
uuuuucugcuuucauuuuaauuuugggaaauu

SEQ ID NO: 547741 - RNA, 32 nt, Human
uuuuucugcuuucugucuuucucccucuccuu

SEQ ID NO: 547742 - RNA, 21 nt, Human
uuuuucugcuuuguuuuuuca

SEQ ID NO: 547743 - RNA, 32 nt, Human
uuuuucuggaaacacauuuauggcuuuuauaa

SEQ ID NO: 547744 - RNA, 32 nt, Human
uuuuucugggcuuuuccuuuugcacauuccaa

SEQ ID NO: 547745 - RNA, 32 nt, Human
uuuuucugguccauuucccauuuccuuuucuu

SEQ ID NO: 547746 - RNA, 32 nt, Human
uuuuucuguaguucacuguauaaaguauuugg

SEQ ID NO: 547747 - RNA, 32 nt, Human
uuuuucugucaauauguccuugcccacugccu

SEQ ID NO: 547748 - RNA, 32 nt, Human
uuuuucugucaugcccugggggcuucugcucu

SEQ ID NO: 547749 - RNA, 32 nt, Human
uuuuucugucuccugcugucucugugugggau

SEQ ID NO: 547750 - RNA, 32 nt, Human
uuuuucugucucuguguuugaaguuucaguuu

SEQ ID NO: 547751 - RNA, 32 nt, Human
uuuuucugucuuauguccaaccccucauuaaa

SEQ ID NO: 547752 - RNA, 32 nt, Human
uuuuucuguggcuuuagcaguggggccgugcg

SEQ ID NO: 547753 - RNA, 32 nt, Human
uuuuucugugggagagaaagaauccuagaggc

SEQ ID NO: 547754 - RNA, 32 nt, Human
uuuuucuguguaugggccuggucaguguaaag

SEQ ID NO: 547755 - RNA, 32 nt, Human
uuuuucuguugucauuaaagcaucaccaagca

SEQ ID NO: 547756 - RNA, 32 nt, Human
uuuuucuguuuuaaaauaucuuccugcacugg

SEQ ID NO: 547757 - RNA, 32 nt, Human
uuuuucuuaccagucuccuccccuacucugcc

SEQ ID NO: 547758 - RNA, 32 nt, Human
uuuuucuuagaacuucagcugauugcagagau

SEQ ID NO: 547759 - RNA, 32 nt, Human
uuuuucuucaaggagcacuagcugcuggggaa

SEQ ID NO: 547760 - RNA, 32 nt, Human
uuuuucuuccacugccacucucuuuaccuuua

SEQ ID NO: 547761 - RNA, 32 nt, Human
uuuuucuucccuucaugaacuuuagguacaca

SEQ ID NO: 547762 - RNA, 32 nt, Human
uuuuucuucccuuuuauucaccacuugacuuc

SEQ ID NO: 547763 - RNA, 32 nt, Human
uuuuucuuccuccucaacugagaucuuuccaa

SEQ ID NO: 547764 - RNA, 32 nt, Human
uuuuucuuccucuaguggguccauaacaaaua

SEQ ID NO: 547765 - RNA, 32 nt, Human
uuuuucuucuccccaccucccugcucucuuuc

SEQ ID NO: 547766 - RNA, 32 nt, Human
uuuuucuucucccccgcucccugcucucuuuc

SEQ ID NO: 547767 - RNA, 32 nt, Human
uuuuucuucugcccaggcaccauauuuuuaua

SEQ ID NO: 547768 - RNA, 32 nt, Human
uuuuucuucugcuaugugacuugcaucgugga

SEQ ID NO: 547769 - RNA, 32 nt, Human
uuuuucuucuucuuccuucugucccuccugcc

SEQ ID NO: 547770 - RNA, 32 nt, Human
uuuuucuucuucuucuucuuuugugguuucac

SEQ ID NO: 547771 - RNA, 32 nt, Human
uuuuucuucuucuugcuggugauggucuugcu

SEQ ID NO: 547772 - RNA, 32 nt, Human
uuuuucuucuuucuuucuuuugcaggaguuug

SEQ ID NO: 547773 - RNA, 32 nt, Human
uuuuucuugaaugaaauagcaggaagcuccuc

SEQ ID NO: 547774 - RNA, 32 nt, Human
uuuuucuugaugguuucccucucccucccucu

SEQ ID NO: 547775 - RNA, 32 nt, Human
uuuuucuugaugucuguggcucagucaguaua

SEQ ID NO: 547776 - RNA, 32 nt, Human
uuuuucuuggacuacuuuaauuuggauccuuu

SEQ ID NO: 547777 - RNA, 32 nt, Human
uuuuucuuggcauuacagauuuugccaaaaua

SEQ ID NO: 547778 - RNA, 32 nt, Human
uuuuucuuggguauggagguuucuugaagacc

SEQ ID NO: 547779 - RNA, 32 nt, Human
uuuuucuugguggaaauggacaaguuuaggca

SEQ ID NO: 547780 - RNA, 32 nt, Human
uuuuucuuguggugaggacacuugucuuaguc

SEQ ID NO: 547781 - RNA, 32 nt, Human
uuuuucuuguguuugcuuugcuuuuugacaac

SEQ ID NO: 547782 - RNA, 32 nt, Human
uuuuucuuuacaaaacaaacucaucauuaguc

SEQ ID NO: 547783 - RNA, 32 nt, Human
uuuuucuuuaucugaguaugggagaaaauacu

SEQ ID NO: 547784 - RNA, 32 nt, Human
uuuuucuuucauguggaaguuggaagacaagg

SEQ ID NO: 547785 - RNA, 32 nt, Human
uuuuucuuucauuuuucucucauuccauuucu

SEQ ID NO: 547786 - RNA, 32 nt, Human
uuuuucuuuccucccuuaccccaaauucauug

SEQ ID NO: 547787 - RNA, 32 nt, Human
uuuuucuuucuuccuuuccugaauacacuccc

SEQ ID NO: 547788 - RNA, 32 nt, Human
uuuuucuuucuuccuuucuuccuuggccaaga

SEQ ID NO: 547789 - RNA, 32 nt, Human
uuuuucuuucuuucuuucuuucuuucuuucuu

SEQ ID NO: 547790 - RNA, 32 nt, Human
uuuuucuuugagacugggucucgcuuuguugc

SEQ ID NO: 547791 - RNA, 32 nt, Human
uuuuucuuugagaugaagucucccucuuguua

SEQ ID NO: 547792 - RNA, 32 nt, Human
uuuuucuuugagaugcggucuugcucuguugc

SEQ ID NO: 547793 - RNA, 32 nt, Human
uuuuucuuuuaaauagaacuuguuuuuauaau

SEQ ID NO: 547794 - RNA, 32 nt, Human
uuuuucuuuucuuucuuucuccuuccuuccuu

SEQ ID NO: 547795 - RNA, 32 nt, Human
uuuuucuuuuggugcagaaccguugugcagug

SEQ ID NO: 547796 - RNA, 32 nt, Human
uuuuucuuuuguuagaggagagcuugauguga

SEQ ID NO: 547797 - RNA, 32 nt, Human
uuuuucuuuuuccucccuuagaaaguuucucu

SEQ ID NO: 547798 - RNA, 32 nt, Human
uuuuucuuuuuccugcuguauaacuccuugcc

SEQ ID NO: 547799 - RNA, 32 nt, Human
uuuuucuuuuucuccccuuccuccuuacccuc

SEQ ID NO: 547800 - RNA, 32 nt, Human
uuuuucuuuuucuuuuucuguuucucucccuu

SEQ ID NO: 547801 - RNA, 32 nt, Human
uuuuugaaaauuaauuaaagaugggaauaagu

SEQ ID NO: 547802 - RNA, 32 nt, Human
uuuuugaaacagaaucuugcucugucucccag

SEQ ID NO: 547803 - RNA, 24 nt, Human
uuuuugaaacagggucucacucua

SEQ ID NO: 547804 - RNA, 24 nt, Human
uuuuugaaacggagucucacucug

SEQ ID NO: 547805 - RNA, 24 nt, Human
uuuuugaaacgggagucucacucu

SEQ ID NO: 547806 - RNA, 32 nt, Human
uuuuugaaagaaugucuuggaaugcgcaaguc

SEQ ID NO: 547807 - RNA, 32 nt, Human
uuuuugaaagaguucuccucauaggaggauga

SEQ ID NO: 547808 - RNA, 32 nt, Human
uuuuugaaaguugccuuuucucuccacccuug

SEQ ID NO: 547809 - RNA, 24 nt, Human
uuuuugaaauaaggucucacucug

SEQ ID NO: 547810 - RNA, 32 nt, Human
uuuuugaaccaccacagacaucuccuuucccg

SEQ ID NO: 547811 - RNA, 32 nt, Human
uuuuugaacgugggaaucccuuuugcuucaug

SEQ ID NO: 547812 - RNA, 32 nt, Human
uuuuugaacuaaauaguggugauggcuacaca

SEQ ID NO: 547813 - RNA, 32 nt, Human
uuuuugaagagaaguuguggcuuauguggagu

SEQ ID NO: 547814 - RNA, 32 nt, Human
uuuuugaagcauuucauaagggccaaggaagu

SEQ ID NO: 547815 - RNA, 32 nt, Human
uuuuugaaggaguggauuuucuuuguugcagu

SEQ ID NO: 547816 - RNA, 32 nt, Human
uuuuugaaggcauaugguuggagagaaccauu

SEQ ID NO: 547817 - RNA, 32 nt, Human
uuuuugaauagagacuccauggaguuggucau

SEQ ID NO: 547818 - RNA, 32 nt, Human
uuuuugaauaguauguuacugcagcuuuggua

SEQ ID NO: 547819 - RNA, 32 nt, Human
uuuuugaauauuacucuugcucugguauuguu

SEQ ID NO: 547820 - RNA, 32 nt, Human
uuuuugaauauugcaggguucagucuagauug

SEQ ID NO: 547821 - RNA, 32 nt, Human
uuuuugaauguacugguaaugccuaauguggu

SEQ ID NO: 547822 - RNA, 23 nt, Human
uuuuugaauuucguauucuuuca

SEQ ID NO: 547823 - RNA, 32 nt, Human
uuuuugacaaaaauggcuccauuuuuccacag

SEQ ID NO: 547824 - RNA, 24 nt, Human
uuuuugacacggagucucacucug

SEQ ID NO: 547825 - RNA, 32 nt, Human
uuuuugacacuuccauuguuuaaaaauacaca

SEQ ID NO: 547826 - RNA, 32 nt, Human
uuuuugacagcaauggagaauggguuauauaa

SEQ ID NO: 547827 - RNA, 32 nt, Human
uuuuugacagcuuccugucaagcaaucaagaa

SEQ ID NO: 547828 - RNA, 22 nt, Human
uuuuugacagggucucacucug

SEQ ID NO: 547829 - RNA, 32 nt, Human
uuuuugacaucuuuauagcagugcuguuuccu

SEQ ID NO: 547830 - RNA, 32 nt, Human
uuuuugaccacugucuguucaccauguugcaa

SEQ ID NO: 547831 - RNA, 32 nt, Human
uuuuugaccuaagaucucagcaauuugaacac

SEQ ID NO: 547832 - RNA, 32 nt, Human
uuuuugacuguacauuacagugaaguguaauc

SEQ ID NO: 547833 - RNA, 32 nt, Human
uuuuugagaagagaugagguauauguuacaau

SEQ ID NO: 547834 - RNA, 22 nt, Human
uuuuugagaagaggucucacuc

SEQ ID NO: 547835 - RNA, 20 nt, Human
uuuuugagaagucucacucu

SEQ ID NO: 547836 - RNA, 24 nt, Human
uuuuugagacaaagucucacucug

SEQ ID NO: 547837 - RNA, 24 nt, Human
uuuuugagacaaggucucacucug

SEQ ID NO: 547838 - RNA, 24 nt, Human
uuuuugagacacagucucacucug

SEQ ID NO: 547839 - RNA, 23 nt, Human
uuuuugagacagaaucucacucu

SEQ ID NO: 547840 - RNA, 32 nt, Human
uuuuugagacagaguagcucucugccagccag

SEQ ID NO: 547841 - RNA, 24 nt, Human
uuuuugagacagagucucacccug

SEQ ID NO: 547842 - RNA, 32 nt, Human
uuuuugagacagagucucacccuguugcccag

SEQ ID NO: 547843 - RNA, 23 nt, Human
uuuuugagacagagucucacucu

SEQ ID NO: 547844 - RNA, 24 nt, Human
uuuuugagacagagucucacucua

SEQ ID NO: 547845 - RNA, 24 nt, Human
uuuuugagacagagucucacucug

SEQ ID NO: 547846 - RNA, 32 nt, Human
uuuuugagacagagucucacucuguugccagg

SEQ ID NO: 547847 - RNA, 32 nt, Human
uuuuugagacagagucucacucuguugcccag

SEQ ID NO: 547848 - RNA, 32 nt, Human
uuuuugagacagagucucacucuguugcccgg

SEQ ID NO: 547849 - RNA, 32 nt, Human
uuuuugagacagagucucacucuguugccuag

SEQ ID NO: 547850 - RNA, 32 nt, Human
uuuuugagacagagucucacucuuguugccca

SEQ ID NO: 547851 - RNA, 32 nt, Human
uuuuugagacagagucucacucuuucacccaa

SEQ ID NO: 547852 - RNA, 22 nt, Human
uuuuugagacagagucucauuc

SEQ ID NO: 547853 - RNA, 32 nt, Human
uuuuugagacagagucucccucugucaccagg

SEQ ID NO: 547854 - RNA, 32 nt, Human
uuuuugagacagagucucccucuguuguccaa

SEQ ID NO: 547855 - RNA, 22 nt, Human
uuuuugagacagagucucgcuc

SEQ ID NO: 547856 - RNA, 32 nt, Human
uuuuugagacagagucucgcuccauugcccag

SEQ ID NO: 547857 - RNA, 32 nt, Human
uuuuugagacagagucucgcucuauugcccag

SEQ ID NO: 547858 - RNA, 32 nt, Human
uuuuugagacagagucucgcucuguugccagg

SEQ ID NO: 547859 - RNA, 32 nt, Human
uuuuugagacagagucucgcucuguugcccag

SEQ ID NO: 547860 - RNA, 32 nt, Human
uuuuugagacagagucucgcucuguugccuag

SEQ ID NO: 547861 - RNA, 32 nt, Human
uuuuugagacagagucucgcucuuucacccag

SEQ ID NO: 547862 - RNA, 32 nt, Human
uuuuugagacagagucucucucuguugcccag

SEQ ID NO: 547863 - RNA, 24 nt, Human
uuuuugagacagggccucacucug

SEQ ID NO: 547864 - RNA, 23 nt, Human
uuuuugagacagggucucacucu

SEQ ID NO: 547865 - RNA, 24 nt, Human
uuuuugagacagggucucacucug

SEQ ID NO: 547866 - RNA, 22 nt, Human
uuuuugagacagucucacucug

SEQ ID NO: 547867 - RNA, 24 nt, Human
uuuuugagacagugccucacucug

SEQ ID NO: 547868 - RNA, 24 nt, Human
uuuuugagacauagucucacucug

SEQ ID NO: 547869 - RNA, 24 nt, Human
uuuuugagaccaagucucacucug

SEQ ID NO: 547870 - RNA, 24 nt, Human
uuuuugagaccgaaucucacucug

SEQ ID NO: 547871 - RNA, 32 nt, Human
uuuuugagaccuagggcuggagugcaguugag

SEQ ID NO: 547872 - RNA, 24 nt, Human
uuuuugagaccuagucucacucug

SEQ ID NO: 547873 - RNA, 23 nt, Human
uuuuugagacggagucccacucu

SEQ ID NO: 547874 - RNA, 24 nt, Human
uuuuugagacggagucucacucug

SEQ ID NO: 547875 - RNA, 25 nt, Human
uuuuugagacgggagucucgcucua

SEQ ID NO: 547876 - RNA, 24 nt, Human
uuuuugagacggggucucacucug

SEQ ID NO: 547877 - RNA, 32 nt, Human
uuuuugagacggggucucucucugucaucugg

SEQ ID NO: 547878 - RNA, 32 nt, Human
uuuuugagacgggguuucgcucuuguugucca

SEQ ID NO: 547879 - RNA, 32 nt, Human
uuuuugagacuaggucuugcucugucacccag

SEQ ID NO: 547880 - RNA, 27 nt, Human
uuuuugagacuccggagucucgcucua

SEQ ID NO: 547881 - RNA, 32 nt, Human
uuuuugagacugagucucacuccaucagccag

SEQ ID NO: 547882 - RNA, 24 nt, Human
uuuuugagacugagucucacucug

SEQ ID NO: 547883 - RNA, 24 nt, Human
uuuuugagacugagucucacuuua

SEQ ID NO: 547884 - RNA, 24 nt, Human
uuuuugagacugagucucauucua

SEQ ID NO: 547885 - RNA, 32 nt, Human
uuuuugagacugagucucucucuguugcccag

SEQ ID NO: 547886 - RNA, 32 nt, Human
uuuuugagagagagucuuacucugccgcccaa

SEQ ID NO: 547887 - RNA, 22 nt, Human
uuuuugagagggaguuucacuc

SEQ ID NO: 547888 - RNA, 32 nt, Human
uuuuugagagguugggcuggcagaucaugagg

SEQ ID NO: 547889 - RNA, 32 nt, Human
uuuuugagaguuuugcucugucacccaggcug

SEQ ID NO: 547890 - RNA, 24 nt, Human
uuuuugagauaaggucucacucua

SEQ ID NO: 547891 - RNA, 32 nt, Human
uuuuugagauagagucuuguucugcugcccaa

SEQ ID NO: 547892 - RNA, 32 nt, Human
uuuuugagauagggucuugcucucucacccag

SEQ ID NO: 547893 - RNA, 21 nt, Human
uuuuugagaugaagucucacu

SEQ ID NO: 547894 - RNA, 24 nt, Human
uuuuugagaugaagucucacucug

SEQ ID NO: 547895 - RNA, 24 nt, Human
uuuuugagauggaaucucacucug

SEQ ID NO: 547896 - RNA, 32 nt, Human
uuuuugagauggaaucucucucuguugcccag

SEQ ID NO: 547897 - RNA, 23 nt, Human
uuuuugagauggagucucacucu

SEQ ID NO: 547898 - RNA, 24 nt, Human
uuuuugagauggagucucacucug

SEQ ID NO: 547899 - RNA, 32 nt, Human
uuuuugagauggagucucgcuccaucaccagg

SEQ ID NO: 547900 - RNA, 24 nt, Human
uuuuugagauggagucucgcucua

SEQ ID NO: 547901 - RNA, 32 nt, Human
uuuuugagauggagucucucucugucacccaa

SEQ ID NO: 547902 - RNA, 32 nt, Human
uuuuugagauggagucucucucugucacccag

SEQ ID NO: 547903 - RNA, 32 nt, Human
uuuuugagauggagucucuugcucugucaucc

SEQ ID NO: 547904 - RNA, 32 nt, Human
uuuuugagauggaguuucacccuuguugccca

SEQ ID NO: 547905 - RNA, 32 nt, Human
uuuuugagauggggacucacucuguugcccag

SEQ ID NO: 547906 - RNA, 32 nt, Human
uuuuugagauggggucucgcuauguugaccag

SEQ ID NO: 547907 - RNA, 32 nt, Human
uuuuugagauggggucucgcucugucaccagg

SEQ ID NO: 547908 - RNA, 32 nt, Human
uuuuugagauggggucuuccucuguugcccag

SEQ ID NO: 547909 - RNA, 32 nt, Human
uuuuugagauggggucuugcuauguugcccag

SEQ ID NO: 547910 - RNA, 32 nt, Human
uuuuugagauggguucucacuauauuguccag

SEQ ID NO: 547911 - RNA, 24 nt, Human
uuuuugagauguagucucacccug

SEQ ID NO: 547912 - RNA, 32 nt, Human
uuuuugagauguagucuuacucugucacccag

SEQ ID NO: 547913 - RNA, 24 nt, Human
uuuuugagccagugucucacucug

SEQ ID NO: 547914 - RNA, 32 nt, Human
uuuuugagccugggcgacagagcgagacucca

SEQ ID NO: 547915 - RNA, 32 nt, Human
uuuuugagccugggcgacagagugagacuccg

SEQ ID NO: 547916 - RNA, 32 nt, Human
uuuuugaggagucgucuugcucuaucaccagg

SEQ ID NO: 547917 - RNA, 32 nt, Human
uuuuugaggaguuucgcucuuguuggcuaggc

SEQ ID NO: 547918 - RNA, 24 nt, Human
uuuuugaggcagagucucacucug

SEQ ID NO: 547919 - RNA, 23 nt, Human
uuuuugaggcgcgucucacccug

SEQ ID NO: 547920 - RNA, 32 nt, Human
uuuuugaggggaagcuggaggcuccccaagga

SEQ ID NO: 547921 - RNA, 32 nt, Human
uuuuugagguggggacacaggagguccagugg

SEQ ID NO: 547922 - RNA, 32 nt, Human
uuuuugaguacauacuauguguuucagaaaua

SEQ ID NO: 547923 - RNA, 32 nt, Human
uuuuugagucagagucucgcucuguugcccag

SEQ ID NO: 547924 - RNA, 32 nt, Human
uuuuugaguguuuucacccugaaaagauuuug

SEQ ID NO: 547925 - RNA, 24 nt, Human
uuuuugauacagagucucacucug

SEQ ID NO: 547926 - RNA, 32 nt, Human
uuuuugauacuuuuuagagcaggauuuuucug

SEQ ID NO: 547927 - RNA, 26 nt, Human
uuuuugauauacuggcuugggaccua

SEQ ID NO: 547928 - RNA, 32 nt, Human
uuuuugauauccauguagggguauuucccaua

SEQ ID NO: 547929 - RNA, 32 nt, Human
uuuuugaugaaaccaggauggcgucgugcggg

SEQ ID NO: 547930 - RNA, 32 nt, Human
uuuuugaugcugcuguguacagucuucauuau

SEQ ID NO: 547931 - RNA, 22 nt, Human
uuuuugauggagucucacucug

SEQ ID NO: 547932 - RNA, 25 nt, Human
uuuuugauguuauuguugggacuua

SEQ ID NO: 547933 - RNA, 32 nt, Human
uuuuugauuaaagcucuucaauccagaugcaa

SEQ ID NO: 547934 - RNA, 32 nt, Human
uuuuugauuauaguaacugagauggaauuuug

SEQ ID NO: 547935 - RNA, 28 nt, Human
uuuuugauugucaguccuauggggcuua

SEQ ID NO: 547936 - RNA, 32 nt, Human
uuuuugauuucuuccagaaggcaaaaagacau

SEQ ID NO: 547937 - RNA, 32 nt, Human
uuuuugcaagagccacuuuuuauuuacuuucu

SEQ ID NO: 547938 - RNA, 32 nt, Human
uuuuugcacaucuggcugaacugggagucagg

SEQ ID NO: 547939 - RNA, 32 nt, Human
uuuuugcaccucuugugcauucugcaagaaga

SEQ ID NO: 547940 - RNA, 32 nt, Human
uuuuugcacugauuuuucuauaccuuaggugg

SEQ ID NO: 547941 - RNA, 32 nt, Human
uuuuugcagauucuuggcuggguuuaguguac

SEQ ID NO: 547942 - RNA, 32 nt, Human
uuuuugcagcccagagcagaacagggaaaagg

SEQ ID NO: 547943 - RNA, 22 nt, Human
uuuuugcauuuguuuauugaau

SEQ ID NO: 547944 - RNA, 32 nt, Human
uuuuugccaaacuguacuuggccacauucagu

SEQ ID NO: 547945 - RNA, 32 nt, Human
uuuuugccaguaaaccaaaaagcagauccuug

SEQ ID NO: 547946 - RNA, 32 nt, Human
uuuuugccauggcuaaucccugcauuuccauu

SEQ ID NO: 547947 - RNA, 22 nt, Human
uuuuugcccaggccggagugca

SEQ ID NO: 547948 - RNA, 32 nt, Human
uuuuugcccaggccggagugcaauggcacgau

SEQ ID NO: 547949 - RNA, 24 nt, Human
uuuuugcccaggcuggagugcagu

SEQ ID NO: 547950 - RNA, 32 nt, Human
uuuuugcccaggcuggagugcaguggcgccau

SEQ ID NO: 547951 - RNA, 32 nt, Human
uuuuugcccaggcuggagugcaguggugcgau

SEQ ID NO: 547952 - RNA, 32 nt, Human
uuuuugccccugcuuuugcuuuggauuauacc

SEQ ID NO: 547953 - RNA, 32 nt, Human
uuuuugccccuucaacuguuuucaucugcccu

SEQ ID NO: 547954 - RNA, 32 nt, Human
uuuuugcccuuccuuucuuuaaagcuauucuc

SEQ ID NO: 547955 - RNA, 32 nt, Human
uuuuugccuaggcuggagugcagugguacaau

SEQ ID NO: 547956 - RNA, 32 nt, Human
uuuuugccucacuuaauuccagccuuuuguuu

SEQ ID NO: 547957 - RNA, 32 nt, Human
uuuuugccuccaccaucauguuuuccaucacu

SEQ ID NO: 547958 - RNA, 32 nt, Human
uuuuugccuccaccuuuuagcccacaucauuu

SEQ ID NO: 547959 - RNA, 32 nt, Human
uuuuugccucuuuagauuacauagaagcauug

SEQ ID NO: 547960 - RNA, 32 nt, Human
uuuuugcuauaccauuuuauuuccgaaguuga

SEQ ID NO: 547961 - RNA, 32 nt, Human
uuuuugcucugccccugaccccuugucccucu

SEQ ID NO: 547962 - RNA, 32 nt, Human
uuuuugcugcuggccacccaugccucugauga

SEQ ID NO: 547963 - RNA, 32 nt, Human
uuuuugcugcuuggagugaucacaggccugug

SEQ ID NO: 547964 - RNA, 32 nt, Human
uuuuugcuggugguaaugaugaguuuugucac

SEQ ID NO: 547965 - RNA, 32 nt, Human
uuuuugcuuaacuuccauguucugggugaugg

SEQ ID NO: 547966 - RNA, 32 nt, Human
uuuuugcuucaguuguaaagaagagggaauac

SEQ ID NO: 547967 - RNA, 32 nt, Human
uuuuugcuugcuuaagaaugauuuggacuuuc

SEQ ID NO: 547968 - RNA, 32 nt, Human
uuuuugcuugucugaugacugauggcuccacc

SEQ ID NO: 547969 - RNA, 32 nt, Human
uuuuugcuuugacugcagucagcuguccuucc

SEQ ID NO: 547970 - RNA, 32 nt, Human
uuuuuggaaugcgagcucccaccagaagaagg

SEQ ID NO: 547971 - RNA, 22 nt, Human
uuuuuggacacacccaggaagg

SEQ ID NO: 547972 - RNA, 32 nt, Human
uuuuuggagaaaaggaacagggcaguggaaug

SEQ ID NO: 547973 - RNA, 32 nt, Human
uuuuuggagacagggucucacucugucacaca

SEQ ID NO: 547974 - RNA, 32 nt, Human
uuuuuggagacagggucucacuguguugccca

SEQ ID NO: 547975 - RNA, 32 nt, Human
uuuuuggagacagggucucgcucuguugccca

SEQ ID NO: 547976 - RNA, 32 nt, Human
uuuuuggagacagggucucgcugcgguggcac

SEQ ID NO: 547977 - RNA, 32 nt, Human
uuuuuggagacagggucucucucuguggccca

SEQ ID NO: 547978 - RNA, 32 nt, Human
uuuuuggagacagggucuugcucugucgccca

SEQ ID NO: 547979 - RNA, 32 nt, Human
uuuuuggagauggacucucauucugucacccg

SEQ ID NO: 547980 - RNA, 32 nt, Human
uuuuuggagauggagucucgcucugucgccca

SEQ ID NO: 547981 - RNA, 32 nt, Human
uuuuuggagaugguucugacucugucacccag

SEQ ID NO: 547982 - RNA, 32 nt, Human
uuuuuggagcccugucucacuugauugacagc

SEQ ID NO: 547983 - RNA, 32 nt, Human
uuuuuggagcuuccauccugguucuuccaaag

SEQ ID NO: 547984 - RNA, 32 nt, Human
uuuuuggaucagcucagacauauuucaguaua

SEQ ID NO: 547985 - RNA, 32 nt, Human
uuuuuggaugaagaaaaagccaguugguaagc

SEQ ID NO: 547986 - RNA, 32 nt, Human
uuuuuggaugcugaugauagacuugcaucuca

SEQ ID NO: 547987 - RNA, 32 nt, Human
uuuuuggcaaaaauuucacaagacuuauuuua

SEQ ID NO: 547988 - RNA, 32 nt, Human
uuuuuggcaaagcacaucaauguuagacuagu

SEQ ID NO: 547989 - RNA, 32 nt, Human
uuuuuggcacauacuagaaaggcagugccuca

SEQ ID NO: 547990 - RNA, 32 nt, Human
uuuuuggcaccauaguagaacaugguugcuuu

SEQ ID NO: 547991 - RNA, 18 nt, Human
uuuuuggcccucccucag

SEQ ID NO: 547992 - RNA, 32 nt, Human
uuuuuggcgagacagggucucacucuguuacc

SEQ ID NO: 547993 - RNA, 32 nt, Human
uuuuuggcugccucugucggucuguucaguua

SEQ ID NO: 547994 - RNA, 32 nt, Human
uuuuuggcugugagacuagcacuaaggauucu

SEQ ID NO: 547995 - RNA, 32 nt, Human
uuuuuggcuguggcuggaauaaaucauuuauu

SEQ ID NO: 547996 - RNA, 32 nt, Human
uuuuugggaaaaggaaaaacgaguaaaaauaa

SEQ ID NO: 547997 - RNA, 32 nt, Human
uuuuugggaaaaucauauauccuaucuucuca

SEQ ID NO: 547998 - RNA, 32 nt, Human
uuuuugggaagguagaagcauuuggcacagaa

SEQ ID NO: 547999 - RNA, 22 nt, Human
uuuuugggacagagucucacuc

SEQ ID NO: 548000 - RNA, 22 nt, Human
uuuuugggacggagucucacuc

SEQ ID NO: 548001 - RNA, 32 nt, Human
uuuuugggaggcaccaggcggggaggaguugg

SEQ ID NO: 548002 - RNA, 32 nt, Human
uuuuugggaguuauucccuaaauaacugcauu

SEQ ID NO: 548003 - RNA, 32 nt, Human
uuuuugggcugauuccaaggggcuuaugugug

SEQ ID NO: 548004 - RNA, 32 nt, Human
uuuuuggggaaaggaaacuaguaguguuuccu

SEQ ID NO: 548005 - RNA, 32 nt, Human
uuuuuggggauggagucucccucuguugccca

SEQ ID NO: 548006 - RNA, 32 nt, Human
uuuuuggggauguggagguaguuggguagaaa

SEQ ID NO: 548007 - RNA, 32 nt, Human
uuuuuggggcagagaggcacucaggcugguuu

SEQ ID NO: 548008 - RNA, 22 nt, Human
uuuuugguaacguaacugucaa

SEQ ID NO: 548009 - RNA, 32 nt, Human
uuuuugguacaauuacuucaucuggaaugucu

SEQ ID NO: 548010 - RNA, 24 nt, Human
uuuuugguauuuuuuguauuguaa

SEQ ID NO: 548011 - RNA, 32 nt, Human
uuuuuggucagcaugguugaugaacuaaugau

SEQ ID NO: 548012 - RNA, 32 nt, Human
uuuuuggugagguuggaagauggauggaagcc

SEQ ID NO: 548013 - RNA, 32 nt, Human
uuuuuggugcaguuucagcucacugcaaccuc

SEQ ID NO: 548014 - RNA, 18 nt, Human
uuuuuggugcucccucag

SEQ ID NO: 548015 - RNA, 32 nt, Human
uuuuuggugcugcugguuucuccagaccucgc

SEQ ID NO: 548016 - RNA, 23 nt, Human
uuuuugguggcucucaacuggaa

SEQ ID NO: 548017 - RNA, 32 nt, Human
uuuuuggugugaguuuucacauacuuuauuuc

SEQ ID NO: 548018 - RNA, 32 nt, Human
uuuuugguuccacaccugucuucucaggcuug

SEQ ID NO: 548019 - RNA, 32 nt, Human
uuuuugguugcaaaacagagacaugguucuau

SEQ ID NO: 548020 - RNA, 17 nt, Human
uuuuugguuuccuucag

SEQ ID NO: 548021 - RNA, 16 nt, Human
uuuuugguuucuucaa

SEQ ID NO: 548022 - RNA, 32 nt, Human
uuuuugguuugaagacuuugucuaagccucau

SEQ ID NO: 548023 - RNA, 32 nt, Human
uuuuugguuugcgucaucaucaggcccgggcu

SEQ ID NO: 548024 - RNA, 32 nt, Human
uuuuugguuuguuuguuuguuuucccuucccc

SEQ ID NO: 548025 - RNA, 32 nt, Human
uuuuugguuuuuaagaauuucuugauacucuu

SEQ ID NO: 548026 - RNA, 32 nt, Human
uuuuuguaacuugccauccgcacagaaaauac

SEQ ID NO: 548027 - RNA, 32 nt, Human
uuuuuguaaggaagaucauaaaugcuaaaaau

SEQ ID NO: 548028 - RNA, 32 nt, Human
uuuuuguaagguuuuuguguuuuccuuucauu

SEQ ID NO: 548029 - RNA, 32 nt, Human
uuuuuguaauguuggcauacuuggggaauuua

SEQ ID NO: 548030 - RNA, 32 nt, Human
uuuuuguacaguauuuucuccuucguuguauu

SEQ ID NO: 548031 - RNA, 32 nt, Human
uuuuuguaccagagucccagacuaacuguugg

SEQ ID NO: 548032 - RNA, 32 nt, Human
uuuuuguagacagggucucacuguguugccca

SEQ ID NO: 548033 - RNA, 32 nt, Human
uuuuuguagacagggucucccuauguugccca

SEQ ID NO: 548034 - RNA, 32 nt, Human
uuuuuguagagaagagauuuggccauguugcc

SEQ ID NO: 548035 - RNA, 32 nt, Human
uuuuuguagcuacugguguacuaugacaguua

SEQ ID NO: 548036 - RNA, 32 nt, Human
uuuuuguaguuguggcaucuuguugacaucga

SEQ ID NO: 548037 - RNA, 32 nt, Human
uuuuuguauaacugcuuccugccuccuuccaa

SEQ ID NO: 548038 - RNA, 32 nt, Human
uuuuuguauacaaauaaaauuugaacugaacc

SEQ ID NO: 548039 - RNA, 32 nt, Human
uuuuuguauuuauuuucuacuguguaaaugua

SEQ ID NO: 548040 - RNA, 32 nt, Human
uuuuuguauuuuuaauaaagaugggguuucac

SEQ ID NO: 548041 - RNA, 32 nt, Human
uuuuuguauuuuuaauagagacaggguuucac

SEQ ID NO: 548042 - RNA, 32 nt, Human
uuuuuguauuuuuaauagagacgggguuucac

SEQ ID NO: 548043 - RNA, 32 nt, Human
uuuuuguauuuuuaauagagacgggguuucgc

SEQ ID NO: 548044 - RNA, 32 nt, Human
uuuuuguauuuuuaauagagaugggguuucac

SEQ ID NO: 548045 - RNA, 32 nt, Human
uuuuuguauuuuuaauagagaugggguuuugc

SEQ ID NO: 548046 - RNA, 32 nt, Human
uuuuuguauuuuuacuagagacaggguuucac

SEQ ID NO: 548047 - RNA, 32 nt, Human
uuuuuguauuuuuacuagagacgggguuucag

SEQ ID NO: 548048 - RNA, 32 nt, Human
uuuuuguauuuuuacuggagacaggguuucac

SEQ ID NO: 548049 - RNA, 32 nt, Human
uuuuuguauuuuuagaagagaugggguuucuc

SEQ ID NO: 548050 - RNA, 32 nt, Human
uuuuuguauuuuuagcagagaugggguuucac

SEQ ID NO: 548051 - RNA, 32 nt, Human
uuuuuguauuuuuagcagagaugggguuuuac

SEQ ID NO: 548052 - RNA, 32 nt, Human
uuuuuguauuuuuaggagagaugggguuucgc

SEQ ID NO: 548053 - RNA, 32 nt, Human
uuuuuguauuuuuaguagagacaggguucuua

SEQ ID NO: 548054 - RNA, 32 nt, Human
uuuuuguauuuuuaguagagacaggguuggcc

SEQ ID NO: 548055 - RNA, 32 nt, Human
uuuuuguauuuuuaguagagacaggguuucac

SEQ ID NO: 548056 - RNA, 32 nt, Human
uuuuuguauuuuuaguagagacaggguuucau

SEQ ID NO: 548057 - RNA, 32 nt, Human
uuuuuguauuuuuaguagagacaggguuucca

SEQ ID NO: 548058 - RNA, 32 nt, Human
uuuuuguauuuuuaguagagacaggguuucgc

SEQ ID NO: 548059 - RNA, 32 nt, Human
uuuuuguauuuuuaguagagacaggguuuuac

SEQ ID NO: 548060 - RNA, 32 nt, Human
uuuuuguauuuuuaguagagacaggguuuugc

SEQ ID NO: 548061 - RNA, 32 nt, Human
uuuuuguauuuuuaguagagacgaggguucac

SEQ ID NO: 548062 - RNA, 32 nt, Human
uuuuuguauuuuuaguagagacgggguaucac

SEQ ID NO: 548063 - RNA, 32 nt, Human
uuuuuguauuuuuaguagagacgguguuucac

SEQ ID NO: 548064 - RNA, 32 nt, Human
uuuuuguauuuuuaguagagacgguguuucag

SEQ ID NO: 548065 - RNA, 32 nt, Human
uuuuuguauuuuuaguagagauagggucucac

SEQ ID NO: 548066 - RNA, 32 nt, Human
uuuuuguauuuuuaguagagauaggguuucac

SEQ ID NO: 548067 - RNA, 32 nt, Human
uuuuuguauuuuuaguagagauggggcuucac

SEQ ID NO: 548068 - RNA, 32 nt, Human
uuuuuguauuuuuaguagagauggggguuuca

SEQ ID NO: 548069 - RNA, 32 nt, Human
uuuuuguauuuuuaguagagauggggguuuuc

SEQ ID NO: 548070 - RNA, 32 nt, Human
uuuuuguauuuuuaguagagauggggucucac

SEQ ID NO: 548071 - RNA, 32 nt, Human
uuuuuguauuuuuaguagagaugggguuccac

SEQ ID NO: 548072 - RNA, 32 nt, Human
uuuuuguauuuuuaguagagaugggguuucac

SEQ ID NO: 548073 - RNA, 32 nt, Human
uuuuuguauuuuuaguagagaugggguuucau

SEQ ID NO: 548074 - RNA, 32 nt, Human
uuuuuguauuuuuaguagagaugggguuuccc

SEQ ID NO: 548075 - RNA, 32 nt, Human
uuuuuguauuuuuaguagagaugggguuucgc

SEQ ID NO: 548076 - RNA, 32 nt, Human
uuuuuguauuuuuaguagagaugggguuucuc

SEQ ID NO: 548077 - RNA, 32 nt, Human
uuuuuguauuuuuaguagagaugggguuugac

SEQ ID NO: 548078 - RNA, 32 nt, Human
uuuuuguauuuuuaguagagaugggguuugcc

SEQ ID NO: 548079 - RNA, 32 nt, Human
uuuuuguauuuuuaguagagaugggguuuggc

SEQ ID NO: 548080 - RNA, 32 nt, Human
uuuuuguauuuuuaguagagaugggguuuuac

SEQ ID NO: 548081 - RNA, 32 nt, Human
uuuuuguauuuuuaguagagaugggguuuugc

SEQ ID NO: 548082 - RNA, 32 nt, Human
uuuuuguauuuuuaguagagauuggguuucac

SEQ ID NO: 548083 - RNA, 32 nt, Human
uuuuuguauuuuuaguagaggaugggguuuca

SEQ ID NO: 548084 - RNA, 32 nt, Human
uuuuuguauuuuuaguagaggugggguuucac

SEQ ID NO: 548085 - RNA, 32 nt, Human
uuuuuguauuuuuaguagaggugggguuucau

SEQ ID NO: 548086 - RNA, 32 nt, Human
uuuuuguauuuuuaguagggaugggguuucac

SEQ ID NO: 548087 - RNA, 32 nt, Human
uuuuuguauuuuuaguggagauaggguuucac

SEQ ID NO: 548088 - RNA, 32 nt, Human
uuuuuguauuuuuaguggagaugggguuucac

SEQ ID NO: 548089 - RNA, 32 nt, Human
uuuuuguauuuuuaguggagaugggguuuuac

SEQ ID NO: 548090 - RNA, 32 nt, Human
uuuuuguauuuuuaguggggaugggguuucac

SEQ ID NO: 548091 - RNA, 32 nt, Human
uuuuuguauuuuuaguugagaugggguuuuuc

SEQ ID NO: 548092 - RNA, 32 nt, Human
uuuuuguauuuuuauagagacaggguuucacc

SEQ ID NO: 548093 - RNA, 32 nt, Human
uuuuuguauuuuuauagagauaggguuucacc

SEQ ID NO: 548094 - RNA, 32 nt, Human
uuuuuguauuuuuauuagagacgggguuucac

SEQ ID NO: 548095 - RNA, 32 nt, Human
uuuuuguauuuuuauuagagaugggguuucac

SEQ ID NO: 548096 - RNA, 32 nt, Human
uuuuuguauuuuuauuggagacaggguuucac

SEQ ID NO: 548097 - RNA, 32 nt, Human
uuuuugucaacacucuguaucuaguuaaucug

SEQ ID NO: 548098 - RNA, 32 nt, Human
uuuuugucagcuuuguccaagaucagaugauu

SEQ ID NO: 548099 - RNA, 32 nt, Human
uuuuugucauggugaccagcaguguucccaau

SEQ ID NO: 548100 - RNA, 32 nt, Human
uuuuugucauuuuaaugcuuucuugaauaauu

SEQ ID NO: 548101 - RNA, 32 nt, Human
uuuuuguccaccacccugcucuuuuuaauaau

SEQ ID NO: 548102 - RNA, 32 nt, Human
uuuuuguccagccugccgcuccuggacugccc

SEQ ID NO: 548103 - RNA, 32 nt, Human
uuuuuguccaguuucuuugggggaaggaagac

SEQ ID NO: 548104 - RNA, 32 nt, Human
uuuuuguccugaugucuaaauugcagugauaa

SEQ ID NO: 548105 - RNA, 32 nt, Human
uuuuuguccuuaaucagugugauaugaaaagc

SEQ ID NO: 548106 - RNA, 32 nt, Human
uuuuugucuauuuucuauuuuaguuguggcuu

SEQ ID NO: 548107 - RNA, 32 nt, Human
uuuuugucucuucuuuuugccuaaagccaguc

SEQ ID NO: 548108 - RNA, 32 nt, Human
uuuuugucugucuuugugaggcugcuuugcua

SEQ ID NO: 548109 - RNA, 32 nt, Human
uuuuugucuuccuuuuggcuuuauuuuuaaac

SEQ ID NO: 548110 - RNA, 32 nt, Human
uuuuugucuuguaggauuugcucuuuauuugg

SEQ ID NO: 548111 - RNA, 32 nt, Human
uuuuugucuuuaaugucaggcuuuagauuaga

SEQ ID NO: 548112 - RNA, 32 nt, Human
uuuuugucuuuugguuucuuccuuucuccugg

SEQ ID NO: 548113 - RNA, 32 nt, Human
uuuuugucuuuugguuucuuccuuucuucugg

SEQ ID NO: 548114 - RNA, 32 nt, Human
uuuuugugaagcacuggcauaguugagcaagu

SEQ ID NO: 548115 - RNA, 32 nt, Human
uuuuugugagugagacugagggaucguagauu

SEQ ID NO: 548116 - RNA, 32 nt, Human
uuuuugugcacugugauccuggggaaggguag

SEQ ID NO: 548117 - RNA, 32 nt, Human
uuuuuguggcaggcaucugugggaucuguaau

SEQ ID NO: 548118 - RNA, 32 nt, Human
uuuuuguggccaaauauccuacugugaucacu

SEQ ID NO: 548119 - RNA, 32 nt, Human
uuuuuguggcugcuuuuucuacacauccagau

SEQ ID NO: 548120 - RNA, 32 nt, Human
uuuuuguguggauaugaaacuuaggaaggauc

SEQ ID NO: 548121 - RNA, 32 nt, Human
uuuuuguguuguuccguaugcuaacaugugca

SEQ ID NO: 548122 - RNA, 32 nt, Human
uuuuuguguuuuaguagagauaggguuucacc

SEQ ID NO: 548123 - RNA, 32 nt, Human
uuuuuguuaaaauguuaacuggcaguaagucu

SEQ ID NO: 548124 - RNA, 32 nt, Human
uuuuuguuacaaaaggacagacuuggcaaaca

SEQ ID NO: 548125 - RNA, 32 nt, Human
uuuuuguuacaaaaggacagacuuggcaagca

SEQ ID NO: 548126 - RNA, 32 nt, Human
uuuuuguuacugacaguuaacaguggugugac

SEQ ID NO: 548127 - RNA, 32 nt, Human
uuuuuguuauucuucccuccccuccacugcau

SEQ ID NO: 548128 - RNA, 32 nt, Human
uuuuuguucacugcaaccucugccuuccaaga

SEQ ID NO: 548129 - RNA, 32 nt, Human
uuuuuguuccaaucuucugugaguuccagcua

SEQ ID NO: 548130 - RNA, 32 nt, Human
uuuuuguuccuuuuuauuuaucugugggcuuu

SEQ ID NO: 548131 - RNA, 32 nt, Human
uuuuuguucuaauauuugauuuaugagaaaug

SEQ ID NO: 548132 - RNA, 32 nt, Human
uuuuuguucucuucccugaagugcuuuacagu

SEQ ID NO: 548133 - RNA, 32 nt, Human
uuuuuguucugccucucaaacuccugaccuca

SEQ ID NO: 548134 - RNA, 32 nt, Human
uuuuuguucuucucacacaauuacuuaagaaa

SEQ ID NO: 548135 - RNA, 32 nt, Human
uuuuuguucuuguuguucucguuguuguuuua

SEQ ID NO: 548136 - RNA, 32 nt, Human
uuuuuguucuuuauucauuugaacacguuuuu

SEQ ID NO: 548137 - RNA, 32 nt, Human
uuuuuguugagaauccacuggcuaucucauaa

SEQ ID NO: 548138 - RNA, 32 nt, Human
uuuuuguugcagaucucgguaccagguuugac

SEQ ID NO: 548139 - RNA, 32 nt, Human
uuuuuguugcuuggcuuuugaaugaguguaaa

SEQ ID NO: 548140 - RNA, 32 nt, Human
uuuuuguugguugccacagcuuggggaaaaau

SEQ ID NO: 548141 - RNA, 32 nt, Human
uuuuuguuucauuuucuucugucucaccucgu

SEQ ID NO: 548142 - RNA, 32 nt, Human
uuuuuguuugagacagagucucgcucugucgu

SEQ ID NO: 548143 - RNA, 32 nt, Human
uuuuuguuugagauggagucucacucugucac

SEQ ID NO: 548144 - RNA, 32 nt, Human
uuuuuguuugugaauaguacuugcaaaacuug

SEQ ID NO: 548145 - RNA, 32 nt, Human
uuuuuguuuguuuuccuuuuccauuuucaaaa

SEQ ID NO: 548146 - RNA, 32 nt, Human
uuuuuguuuguuuuccuuuuugcccaauagag

SEQ ID NO: 548147 - RNA, 32 nt, Human
uuuuuguuuuagcuauccagguugugacuggu

SEQ ID NO: 548148 - RNA, 32 nt, Human
uuuuuguuuucugcuuuuaugacuguauuuau

SEQ ID NO: 548149 - RNA, 32 nt, Human
uuuuuguuuugacuuguauaauuaaggguuug

SEQ ID NO: 548150 - RNA, 32 nt, Human
uuuuuguuuuugcccccaguucuguccacacc

SEQ ID NO: 548151 - RNA, 22 nt, Human
uuuuuuagguggggguggcagg

SEQ ID NO: 548152 - RNA, 21 nt, Human
uuuuuucaugggggaggcggg

SEQ ID NO: 548153 - RNA, 24 nt, Human
uuuuuuccagauuugggguauagg

SEQ ID NO: 548154 - RNA, 18 nt, Human
uuuuuuccagcauacagu

SEQ ID NO: 548155 - RNA, 23 nt, Human
uuuuuuccuggcuggggggcggg

SEQ ID NO: 548156 - RNA, 22 nt, Human
uuuuuucuaugguguaugacag
